United States Patent Application Publication US 2010/0105865 A1 - sequence listing, part 4

SEQ ID NO: 9760 - protein, 427 aa, Streptococcus agalactiae
MSKHQEILEYLENLAVGKRVSVRSISNHLKVSDGTAYRAIKEAENRGIVETRPRSGTVRVAQKAKVNIEKLTYAEIARISDSQVVAGIEGLSKEFSKFSIGAMTHRNIEKYLVQGGLLIVGDRDEIQHLALQHQNAILVTGGFNVSPSVCRLADKLQIPVMVTHYDTFTVSTMINHTLSNAKIRTDLKTVEQVYQSQMDYGFLAQDDTVKEFNLLVKQTKNVRFPIVNQANVVVGVVSVQDILGKDKEVKLATVMSKNIIVAKPRMSLANISQKMIFEDLNMMPVVSDDFELLGVITRRQAVENLSMSQGTDLYTYSDQILSNLQIEDGHFSFLVEPAMIDHTGSLTQGVLTEFLKEICIRVLTRKHQRSIVVKQMTLYFLQPVQIDEIIMVTPTIISEKRREATLDLELKLENKIIAKAMIAVKIN

SEQ ID NO: 9761 - DNA, 750 bp, Streptococcus agalactiae
atgtgggaagttgaagaatacgttcgtagacgttgtaaagaagaaaacgtattgccattgcaaatcggggttgatggtgcagttatggattacccatatgctacttgttgtgggcttaatgatgaagtggctcatgcctttcctcgtcattataccctaaaacaaggtgaccttttaaaagtagatatggttttaagcgaacctttagataaatcaattgttgacgtttcatcgttaaactttgacaacgtggctcaaatgaaaaagtacacggaaacatatagtggtggtttggcagactcgtgttgggcttatgctgtaggtgaagtttcacaagaggtgaaagacttaatgtctgtgacaagagaagcaatgtatattgggattgaaaaagcagttatcggaaaccgcattggtgatattggagctgctattcaggattatgcagagagtcgtggttatggagttgttcgtgatttggttggtcacggtgttggtccaacaatgcatgaagagcctatggtgcctaactatggtacagcaggtcgaggtctccgtcttcgtgaggggatggttttaaccatcgaaccaatgattaatactggtacttgggaaattgatacagacatgaaaactggttgggcacataaaaccttagatggtggtctttcttgtcaatatgaacatcaatttgttatcactaaagatggtcctgttattttaacgagtcaaggagaagaaagaacttac

SEQ ID NO: 9762 - protein, 250 aa, Streptococcus agalactiae
MWEVEEYVRRRCKEENVLPLQIGVDGAVMDYPYATCCGLNDEVAHAFPRHYTLKQGDLLKVDMVLSEPLDKSIVDVSSLNFDNVAQMKKYTETYSGGLADSCWAYAVGEVSQEVKDLMSVTREAMYIGIEKAVIGNRIGDIGAAIQDYAESRGYGVVRDLVGHGVGPTMHEEPMVPNYGTAGRGLRLREGMVLTIEPMINTGTWEIDTDMKTGWAHKTLDGGLSCQYEHQFVITKDGPVILTSQGEERTY

SEQ ID NO: 9763 - DNA, 1944 bp, Streptococcus agalactiae
atgaatgaattagtatctttgttgaatcagtacgcaaaagagtattatacacaagataatcccacagtttctgacagtcaatatgaccagttatatcgagagttagtagaattagaaaagcaacatccagaaaacattttgccaaatagtcccacacatcgagtgggtggtttagttttagaaggctttgaaaaataccaacatgaatatcctttgtattcattgcaggatgctttctcaaaagaagaattgatagcctttgataaacgtgttaaagcagagtttccaactgctgcttatatggcagagctgaaaattgatggtctatctgtctcgttgacttatgtaaatggtgttttacaggttggggcaacacgtggtgatggcaatattggagaaaatattactgaaaatttaaagcgtgttcatgatattcctctacatttagaccaaagtttagatattactgttcgcggagagtgctaccttcccaaagaatcttttgaagctattaacatagaaaaacgagcaaatggtgagcaggaatttgctaatcctaggaatgcagcagcaggaaccttgcgccaattaaacacaggaattgttgcgaaacgtaaattagcaacttttctttatcaagaagctagccctacgcaaaaagaaacacaagatgatgttttaaaagagctagaaagctatggcttttcagtcaatcatcatcgtttaattagctcgtctatggagaaaatttgggattttatccaaactatagaaaaagatagagtttccctcccttatgatatcgatggtattgttattaaggttaatagcatagcaatgcaagaagagctgggcttcactgtaaaggcacctcgttgggcgattgcatataaatttcctgctgaagaaaaggaagcagaaatattatctgttgattggacagttgggcgaacaggagtcgtaacaccaacagctaacctaactccagttcaactagcagggacaaccgttagtagggccactctgcataatgtagattatattgccgaaaaagatatccgtattggagatactgttgttgtatacaaagcaggggatatcatccctgcagtcttaaatgtcgttatgagtaagcgaaaccagcaagaagtcatgcttattcctaaactatgtccttcttgtggtagtgaattagttcattttgaaggtgaggtggctttacgttgtattaatccgctgtgccccaaccaaatcaaagaacgtttagctcattttgctagccgagatgctatgaatattacaggttttggtccatccttagtcgaaaaattatttgatgctcatttaatagcagatgttgcagatatttatcgtttaagtatagagaatttattaactttagatggtattaaagagaaatctgcaactaagatttatcatgcaatccaatcttcaaaagaaaattctgctgaaaaacttctttttggcctaggtattcgtcatgtgggaagcaaggcgagccgccttttattggaggaatttggtaatttgaggcaactaagtcaagcaagtcaagaaagtattgcctcaattgatggactaggaggggttattgccaaatcacttcataccttctttgaaaaagaagaggtagataaactactagaggaattaacttcctataacgttaattttaattatctaggaaaacgagttagtacagatgcacaactttcaggtttaacagtcgttttaaccggtaagcttgaaaaaatgactcgtaatgaagcaaaagagaaattacaaaaccttggtgctaaggtgacaggtagcgtttctaaaaagactgatttaattgttgcaggaagcgatgcaggaagtaaactaaccaaggctcaagatttagggattacaatacaagatgaagactggttactcaacctt

SEQ ID NO: 9764 - protein, 648 aa, Streptococcus agalactiae
MNELVSLLNQYAKEYYTQDNPTVSDSQYDQLYRELVELEKQHPENILPNSPTHRVGGLVLEGFEKYQHEYPLYSLQDAFSKEELIAFDKRVKAEFPTAAYMAELKIDGLSVSLTYVNGVLQVGATRGDGNIGENITENLKRVHDIPLHLDQSLDITVRGECYLPKESFEAINIEKRANGEQEFANPRNAAAGTLRQLNTGIVAKRKLATFLYQEASPTQKETQDDVLKELESYGFSVNHHRLISSSMEKIWDFIQTIEKDRVSLPYDIDGIVIKVNSIAMQEELGFTVKAPRWAIAYKFPAEEKEAEILSVDWTVGRTGVVTPTANLTPVQLAGTTVSRATLHNVDYIAEKDIRIGDTVVVYKAGDIIPAVLNVVMSKRNQQEVMLIPKLCPSCGSELVHFEGEVALRCINPLCPNQIKERLAHFASRDAMNITGFGPSLVEKLFDAHLIADVADIYRLSIENLLTLDGIKEKSATKIYHAIQSSKENSAEKLLFGLGIRHVGSKASRLLLEEFGNLRQLSQASQESIASIDGLGGVIAKSLHTFFEKEEVDKLLEELTSYNVNFNYLGKRVSTDAQLSGLTVVLTGKLEKMTRNEAKEKLQNLGAKVTGSVSKKTDLIVAGSDAGSKLTKAQDLGITIQDEDWLLNL

SEQ ID NO: 9765 - DNA, 1137 bp, Streptococcus agalactiae
atgaaaaatgaaatgttagcactcattctcgccggaggacaaggcactcgactcggaaaattgactcagagcattgcgaaacctgctgttcaatttggaggtcgttaccgtattattgactttgcgctttcaaattgtgcgaattcaggtattaataatgttggagttattactcagtatcaaccgctggaactcaatactcatattggaaacggatctagctggggactagatggtatcgattcgggagtaactgtattacagccatattctgcaacagaaggtaatcgctggtttcaaggtaccagccacgctatctatcaaaatattgactacattgatcgtattaatccagaatatgtactcattctctctggggaccacatctataaaatgaactatgatgacatgctacagacgcataaagataatttagcaagcctaacagtcgctgttttagatgttcctttaaaagaagcaagccgttttggaattatgaatactgattcaaacgaccgtattgtcgaatttgaagaaaaacctgaacatcctaagtcaacaaaggcttcaatgggaatatacatttttgactggaagagattacggacagttttaattgatggtgaaaagaacggcatagacatgtcagactttggtaaaaatgttataccagcataccttgaatcgggtgaacgtgtttatacctataattttgatgggtattggaaagatgttggtactattgaatccctttgggaagctaatatggaatatattggagaagataacaaattacatagtcgtgatcgttcatggaaaatctattctaaaaatttgattgcaccacctaatttcatgacagaagatgcaaatgttaaagattctttagttgtagatggatgctttgttgcaggaaatgttgagcactccattttatcaactaatgtccaggtaaaaccaaatgctattattaaagactcctttgttatgagtggcgcgactatcggtgaaggtgcaaagataaatcgagctattatcggtgaggatgctgttattggtgatggtgttgtgattgatggaagtaaagaagtagaagttattggttataaagaagtagcgggggttccaaatgaagat

SEQ ID NO: 9766 - protein, 379 aa, Streptococcus agalactiae
MKNEMLALILAGGQGTRLGKLTQSIAKPAVQFGGRYRIIDFALSNCANSGINNVGVITQYQPLELNTHIGNGSSWGLDGIDSGVTVLQPYSATEGNRWFQGTSHAIYQNIDYIDRINPEYVLILSGDHIYKMNYDDMLQTHKDNLASLTVAVLDVPLKEASRFGIMNTDSNDRIVEFEEKPEHPKSTKASMGIYIFDWKRLRTVLIDGEKNGIDMSDFGKNVIPAYLESGERVYTYNFDGYWKDVGTIESLWEANMEYIGEDNKLHSRDRSWKIYSKNLIAPPNFMTEDANVKDSLVVDGCFVAGNVEHSILSTNVQVKPNAIIKDSFVMSGATIGEGAKINRAIIGEDAVIGDGVVIDGSKEVEVIGYKEVAGVPNED

SEQ ID NO: 9767 - DNA, 1269 bp, Streptococcus agalactiae
atggataaaattattgtggaaggtgggcaaacgcagcttcaaggtcaagttgttattgaaggagctaaaaatgcagttttacctcttttagcagccacaattttaccaagccaagggaaaacattgttgaccaatgttcctatcttgtctgatgtatttacaatgaacaatgttgttcgtggtttagatattcaagttgactttaattgcgataaaaaagaaatcttagtggatgcctcaggtgatattttagatgttgcaccttatgaatttgttagtcaaatgagagcttctattgttgttttgggacctattttagctagaaatggccatgctaaggtttcaatgccaggcggttgtacaattggtagccgaccaattgaccttcatcttaaaggtttagaagctatgggagctacgattacacaaaatggtggtgatattactgcccaagctgaaaagcttaagggagctaatatatacatggattttccctcagtcggtgccactcaaaacttaatgatggctgctacacttgcttcaggcacaacaacgatagagaatgctgcacgtgaaccagaaattgtagaccttgcgcagttactaaataaaatgggagctaaagtaaagggtgctggtacggaaacattaacgatcattggtgttgatgctttacatggtacagaacatgatgttgtccaagatcgtattgaagctggaacctttatggtggcagctgctatgacttctggaaatgttctagtaaaggatgctatttgggaacataaccgtcctttaatctctaaattgatggagatgggtgttgaagtgtcagaggaagaagatggtattcgtgtaaaagctgatactaaaaaattgaagccagtgactgtgaaaacactccctcatccaggatttcctactgatatgcaagctcaatttacagctctaatggcagtagttaatggcgaatcaactatgattgagacagtttttgaaaatcgttttcaacatttggaagaaatgcgtcgcatgggattacaaacggaaattttacgagatactgcaatgattcatggtgggagagctttacaaggtgcaccggtcatgtctactgacttacgagctagtgcagctttaatcttggcaggaatggttgcgcaagggcaaacagtagttggccaattaacccatttagaccgtggttattatcaattccatgaaaaattagcggctcttggtgctaatattaaacgtgtaagtgaggcg

SEQ ID NO: 9768 - protein, 423 aa, Streptococcus agalactiae
MDKIIVEGGQTQLQGQVVIEGAKNAVLPLLAATILPSQGKTLLTNVPILSDVFTMNNVVRGLDIQVDFNCDKKEILVDASGDILDVAPYEFVSQMRASIVVLGPILARNGHAKVSMPGGCTIGSRPIDLHLKGLEAMGATITQNGGDITAQAEKLKGANIYMDFPSVGATQNLMMAATLASGTTTIENAAREPEIVDLAQLLNKMGAKVKGAGTETLTIIGVDALHGTEHDVVQDRIEAGTFMVAAAMTSGNVLVKDAIWEHNRPLISKLMEMGVEVSEEEDGIRVKADTKKLKPVTVKTLPHPGFPTDMQAQFTALMAVVNGESTMIETVFENRFQHLEEMRRMGLQTEILRDTAMIHGGRALQGAPVMSTDLRASAALILAGMVAQGQTVVGQLTHLDRGYYQFHEKLAALGANIKRVSEA

SEQ ID NO: 9769 - DNA, 519 bp, Streptococcus agalactiae
atgtctcaaattacttttaaaaaggttggccttgataatgtgaatattttacagaatattgctatagaaacctttcggcagacgttttctcatgataatagtgaggaacaacttcaagcatttttcaatgagtcttacactttaccagtattaaaatcggaaattacccatgctgaatctgatacttattttgtttatcttgatacagatttagtgggttatttaaaagtaaactggggaagtcagcaaactgaaaaagatcttgataaagcatttgaaattcaaaggatttatcttctagatgcctaccaagggcaaggtataggtaaggctactttcgaatttgctttggatttagcttataaatcaggcttagattgggcttggttaggtgtttgggagtttaatcataaagctcaggcattttacgctaaatacggatttgaaaaattttctgagcaccaattttcagtaggtgataaagtggatacggattggttattaagaaaaagtttacac

SEQ ID NO: 9770 - protein, 173 aa, Streptococcus agalactiae
MSQITFKKVGLDNVNILQNIAIETFRQTFSHDNSEEQLQAFFNESYTLPVLKSEITHAESDTYFVYLDTDLVGYLKVNWGSQQTEKDLDKAFEIQRIYLLDAYQGQGIGKATFEFALDLAYKSGLDWAWLGVWEFNHKAQAFYAKYGFEKFSEHQFSVGDKVDTDWLLRKSLH

SEQ ID NO: 9771 - DNA, 3621 bp, Streptococcus agalactiae
atgacctttaagcctttcttaaatccagaagatattgctgttattcagacagaagaaaaaaattctgataaaaaacaaaagcgaacgcctgaacaaattgaagccatttatacttttggtaacaatgtcctggtatcagcttcggctggttctggaaagacttttgtaatggttgagcggattttagataaacttttaagaggggttccgattgactctttgtttatctcaacatttacagtaaaagcggcaggtgagctcaaagaacgtttagaaaagaaaataaacgagtctttgaaatccgcagaatcagatgatttaaaacagtttctcacccagcaacttgtcggcattcaaacagctgatattggtactatggatgcttttacgcaaaaaatagttaaccaatatggttatactttgggcatatcacctatatttaggattttacaagataaaaatgagcaagacgtcataaagaatgaggtctatgctgatttattttctgactacatgactgggaagaatgcagcttcattcataaaattagtcaaaaatttctcaggtaatcgtaaagatagcaaagcttttcgagaaatggtttataaagtttatgcttttagccagtccaccgataaccccaagcgctggatgcaaacagtttttctaaaaggtgcacaaacttacactgattttgaagctattccagatcaagaagtttcaagccttttaaatgtaatgcaaacaactgctaatcaattacgtgatttaacggatcaagaagattataagcaattaactgctaaaggggttccgacagcaaattacaaaaaacaccttaaaataattgaaaatttagtccattggtctcaagactttaatttgctgtatggaaaaaaaggattgactaatttggcacgtgatatcactaatgtgattccttcaggcaatgatgttacagttgctggcgttaaatatcctatctttaaacaattgcataatcgtatcgttggacttaagcacttagaagttatttttaagtatcaaggagaatctcttttcttgttagaattattgcaatcctttgttttagatttctcagaacaatatttacaggagaagattcaagaaaatgcttttgaattttctgatattgcccattttgcaattcaaatattggaagaaaatcatgatattaggcaactttatcaagataagtatcatgaagtaatggttgatgagtatcaggacaataaccatacccaagagagaatgttagaattattgtctaatggacataatcgtttcatggttggagacataaaacaatcaatttaccgttttcgtcaggctgatccacaaatttttaatgataaatacaaagcttaccaagacaatccaagtcaagggaaattaattattctgaaagagaattttcggagtcaatcagaggttttagacagtacaaatagtgtgtttacacatcttatggatgaagaagtaggagacattctttatgatgaaagtcaccaattaaaagctggtagtccaagacagcaagaaagacatccgaataataaaacacaagttttactattagatactgatgaagatgatatagatgacagtgatagtcaacaatatgatattagcccagctgaagcaaagttagtcgcaaaagaaattattcgattgcataaagaagagaatgttccctttcaagatatcaccctcttagtttcttcaaggacaaggaatgatggtatcttacaaacttttgaccgttatggtattcctttggtaactgacggtggggagcaaaattacttaaaatcagtcgaagtgatggtaatgcttgatactttgcggtcaattgataatcccttaaatgattatgctctagttgctcttttgagatctcccatgtttggctttaatgaagatgatttaacaagaattgctattcaggatgtcaaaatggctttttatcataaagtgaaattgtcttatcataaagaaggtcatcatagtgatttaattactccagaattatcttctaaaatagatcactttatgaaaacattccagacttggcgtgattttgctaaatggcattcgctttatgatttaatatggaaaatatataatgaccgtttttattatgattatgtaggagctctgcctaaagctgagcaacgtcaagccaatctatatgccttggcacttcgagcaaatcagtttgaaaaaacaggtttcaagggtttatcacgctttattcgaatgattgataaagttttagaaaatgaaaatgatttggcagatgttgaggtggcattaccgcaaaatgctgttaacctaatgactatacacaaatcaaaggggcttgagtttaagtatgtatttattttaaatattgataagaaattttcaatggtagacataacttcccctcttattttaagccgaaatcaaggaattggtattaaatatgttgctgatatgcgacatgaactcgaagaagagatactgcctgcagtaaaggttagcatggaaacacttccttaccaacttaataaaagagagttacgcttagctactttatcagagcaaatgcgtttactttacgtagctatgacacgtgcagagaaaaaattatatctggttggtaaggctagtcaaaccaaatgggctgatcattatgacttagtatctgaaaataatcatctcccattagctagtcgtgagacttttgtgacctttcaagattggttactggctgttcatgaaacctataagaaacaagagttgttttatgacatcaacttcgtatcattagaggaattaacagatcaccacatagggatggttaaccctagtctacctttcaatcccgataataaggtagagaatcgtcagtctgaagatatcgtgcgtgcgattagcgtgttagaatctgttgagcagattaatcaaacttataaagcggctattgagttaccgacagtgagaacaccaagtcaagtcaaaaaaatctatgagcctattctagatatagaaggtgttgatgtgatggaaactattactaaaacatcagtagattttaagttacctgatttttctacaagtaaaaagcaagacccagcagctttaggatctgctgtacatgaattaatgcaacgcatagagatgtcatctcatgtcaaaatggaagatattcaaaaagctttgacagaagtgaatgctgaaacaagtgtcaaagcggctattcagattgaaaaaatcaactattttttccaagaaacctcactcggtaagtatatacaagaagaagtagaacatctgcatcgagaggcaccttttgccatgttaaaagaagatccggagagtggtgagaaattcgttgtacgtggtattattgatgggtatctactattagaaaatcggataattctatttgattataagactgataaatttgtcaatcctctagaattaaaagaacgctatcagggacaaatggctttatatgcagaagctttaaaaaaatcttacgagatagaaaagatagacaaatacttaattcttttaggtggtaaacagctagaagtggtaaaaatggat

SEQ ID NO: 9772 - protein, 1207 aa, Streptococcus agalactiae
MTFKPFLNPEDIAVIQTEEKNSDKKQKRTPEQIEAIYTFGNNVLVSASAGSGKTFVMVERILDKLLRGVPIDSLFISTFTVKAAGELKERLEKKINESLKSAESDDLKQFLTQQLVGIQTADIGTMDAFTQKIVNQYGYTLGISPIFRILQDKNEQDVIKNEVYADLFSDYMTGKNAASFIKLVKNFSGNRKDSKAFREMVYKVYAFSQSTDNPKRWMQTVFLKGAQTYTDFEAIPDQEVSSLLNVMQTTANQLRDLTDQEDYKQLTAKGVPTANYKKHLKIIENLVHWSQDFNLLYGKKGLTNLARDITNVIPSGNDVTVAGVKYPIFKQLHNRIVGLKHLEVIFKYQGESLFLLELLQSFVLDFSEQYLQEKIQENAFEFSDIAHFAIQILEENHDIRQLYQDKYHEVMVDEYQDNNHTQERMLELLSNGHNRFMVGDIKQSIYRFRQADPQIFNDKYKAYQDNPSQGKLIILKENFRSQSEVLDSTNSVFTHLMDEEVGDILYDESHQLKAGSPRQQERHPNNKTQVLLLDTDEDDIDDSDSQQYDISPAEAKLVAKEIIRLHKEENVPFQDITLLVSSRTRNDGILQTFDRYGIPLVTDGGEQNYLKSVEVMVMLDTLRSIDNPLNDYALVALLRSPMFGFNEDDLTRIAIQDVKMAFYHKVKLSYHKEGHHSDLITPELSSKIDHFMKTFQTWRDFAKWHSLYDLIWKIYNDRFYYDYVGALPKAEQRQANLYALALRANQFEKTGFKGLSRFIRMIDKVLENENDLADVEVALPQNAVNLMTIHKSKGLEFKYVFILNIDKKFSMVDITSPLILSRNQGIGIKYVADMRHELEEEILPAVKVSMETLPYQLNKRELRLATLSEQMRLLYVAMTRAEKKLYLVGKASQTKWADHYDLVSENNHLPLASRETFVTFQDWLLAVHETYKKQELFYDINFVSLEELTDHHIGMVNPSLPFNPDNKVENRQSEDIVRAISVLESVEQINQTYKAAIELPTVRTPSQVKKIYEPILDIEGVDVMETITKTSVDFKLPDFSTSKKQDPAALGSAVHELMQRIEMSSHVKMEDIQKALTEVNAETSVKAAIQIEKINYFFQETSLGKYIQEEVEHLHREAPFAMLKEDPESGEKFVVRGIIDGYLLLENRIILFDYKTDKFVNPLELKERYQGQMALYAEALKKSYEIEKIDKYLILLGGKQLEVVKMD

SEQ ID NO: 9773 - DNA, 1374 bp, Streptococcus agalactiae
atgtctattacaaaagaatttgataccatcgcagctatttcaactcctctcggtgagggagctattggtattgtccgtatatctggtacagatgccttaaagatagcatcaaaaatttatcgtggaaaagatctatccgcgatccaatcccataccttaaactatggtcatattgtggacccagataaaaatgaaatcttggatgaagttatgttaggcgttatgcttgctccaaaaacattcacaagagaagatgttattgaaattaatacgcatggaggaattgcagttactaacgaaattcttcagttaattttacgacatggagcacgaatggctgaaccaggagaatttactaaacgtgcttttttaaatggtcgagttgacttgactcaggctgaagctgttatggatcttattagagctaaaacagataaagcaatggatattgccgttaagcaattagatggttctttaaagacactaatcaataacactcgacaagaaattttaaatactctagcccaagttgaagttaatatcgattaccctgaatatgatgacgttgaagagatgactacaacactgatgcgtgaaaaaacacaagagtttcaagcacttatggaaaatttacttcgaactgccagacgtggaaaaattcttcgagaaggactttcaacagcaatcattggtcgtccaaatgtcggtaaatccagcttactaaataacctcttacgtgaagaaaaggcgattgtgacagatattgaaggaacaactcgtgatgttattgaagaatacgtcaatattaaaggagttcctttaaaactagttgacactgctggtatccgtgatacagatgatatcgttgaaaaaattggtgttgaacgttcaaagaaggctttagaagaagccgaccttgtgttgttggttctcaatagttccgaaccactaacattacaagaccgctcccttctagaactaagtaaagaaagtaatcgtatcgtattactcaataaaacggatcttcctcaaaaaatagaagttaacgaattacctaaaaatgttattccaatttcggttttagaaaatgaaaacatcgataaaatcgaagaacgtattaacgatattttctttgacaacgctggtatggtagaacatgacgctacttatctatcaaatgctcgccatatctcactaattgaaaaagccgttgatagtttaaaagctgtcaatgagggcttggaattaggaatgcctgttgatctcttacaagtcgatatgactagaacttgggaaatacttggagaaatcactggggatgcagctccagatgaactaataactcagctcttcagccaattctgcttaggtaaa

SEQ ID NO: 9774 - protein, 458 aa, Streptococcus agalactiae
MSITKEFDTIAAISTPLGEGAIGIVRISGTDALKIASKIYRGKDLSAIQSHTLNYGHIVDPDKNEILDEVMLGVMLAPKTFTREDVIEINTHGGIAVTNEILQLILRHGARMAEPGEFTKRAFLNGRVDLTQAEAVMDLIRAKTDKAMDIAVKQLDGSLKTLINNTRQEILNTLAQVEVNIDYPEYDDVEEMTTTLMREKTQEFQALMENLLRTARRGKILREGLSTAIIGRPNVGKSSLLNNLLREEKAIVTDIEGTTRDVIEEYVNIKGVPLKLVDTAGIRDTDDIVEKIGVERSKKALEEADLVLLVLNSSEPLTLQDRSLLELSKESNRIVLLNKTDLPQKIEVNELPKNVIPISVLENENIDKIEERINDIFFDNAGMVEHDATYLSNARHISLIEKAVDSLKAVNEGLELGMPVDLLQVDMTRTWEILGEITGDAAPDELITQLFSQFCLGK

SEQ ID NO: 9775 - DNA, 1908 bp, Streptococcus agalactiae
atgattatactacaaggaaacaaaattgagcgctcattttcaggtgatgtgctttttgataatattaatattcaagttgatcaacgtgatcgtattgctcttgttggacgtaatggtgctggcaaatcaacgcttcttaaaattttagttggtgaagaggctccgacaaaaggagaaataaataaaaagcgtgatttgagtttgtcctacttggcacaagatagtcgttttcaatctgaaaatacaattttccaagaaatgttacaagtttttgactcattaagagaagtagagaagcgcttacgtgaattggaattacaaatggggcaagtttcaggaagtgacctggaacaattgatgaaaacatacgatattttgtcagaagagtttcgtgaaaaaggtggctttacctatgaatcagatataaaggctattttaaatggttttaagtttaacagtgatatgtgggaaatgcctattagtgaattgtctggcgggcaaaatacacgattagcgcttgcaaaaatgctacttgaaaagccagaattacttgttttagatgaaccaacgaaccatttagacattgatacgattgcttggttagaaaattatcttgtaaattatcaaggagcccttattattgtcagccatgaccgctattttttagacaaggtagctacagtaacttatgatttaacgacacattctctagaccgctatgtaggcaattattcgaaatttatggatcttaaggcagagaaaatagcgactgaagaaaagaattttgaaaaacaacaaaaagaaattgctaagttagaagattttgtacaacgtaacattgttagggcttcaaccactaaacgagcacaagctcgtcgtaaacaattagaaaagatggaacgactcgacaaaccgaatgtagagcaaaaatcagctaatatgacttttcatgctgggaaagtctcagggaatgttgttttaacacttgagaatgcagctattggttatgaaggtgtttctttatcggagccaatcgatttggacgtgaagaaatttgatgctattgcaattgtaggtccaaatggtatcgggaaatcaactttaatcaaatcgcttgttgggcaaattccttttatcaaaggagaagcaaaattaggagcaaatgtcgaaactgggtattacgatcaaagtcaaagtaatttaacaaaaacgaatactgttttagatgagttatgggatgctttttcaacaacgccagaagttgaaattagaaaccgtttaggagcttttcttttttcaggtgatgatgttaaaaaatcagtttcaatgctatcaggtggtgaacgagcgcgtttgctattggcaaaattatctatggaaaataataattttctcatattagatgagccaacaaaccacttggatattgatagtaaagaagtcttagaaaatgcactcatcgaatttgatggcacattactttttgttagtcatgatcgctattttattaatcgtgtggcaactaaggttctcgaaatttctgataagggaagtactctctatctaggagattatgattattacctcactaagaaagccgaactagaggaattagcacgtttaaatgaagaagaagtgagtgcttcaaaaacagaaatcgacgttacatcagattatgagacacaaaaagcaaatcaaaaggaatttaggaaaattacccgtcgcgttgtagaaattgaggcgcgtttggaagttcttgaaaatgatgaaaacaatatcaatggtttaatgttagaaaccaatgacatcggaaaactctctgatttgcaaaaagagctggaatcaatccaagaagaacaattgctattaatggaagagtgggaaaatctaaatatgagactagatttg

SEQ ID NO: 9776 - protein, 636 aa, Streptococcus agalactiae
MIILQGNKIERSFSGDVLFDNINIQVDQRDRIALVGRNGAGKSTLLKILVGEEAPTKGEINKKRDLSLSYLAQDSRFQSENTIFQEMLQVFDSLREVEKRLRELELQMGQVSGSDLEQLMKTYDILSEEFREKGGFTYESDIKAILNGFKFNSDMWEMPISELSGGQNTRLALAKMLLEKPELLVLDEPTNHLDIDTIAWLENYLVNYQGALIIVSHDRYFLDKVATVTYDLTTHSLDRYVGNYSKFMDLKAEKIATEEKNFEKQQKEIAKLEDFVQRNIVRASTTKRAQARRKQLEKMERLDKPNVEQKSANMTFHAGKVSGNVVLTLENAAIGYEGVSLSEPIDLDVKKFDAIAIVGPNGIGKSTLIKSLVGQIPFIKGEAKLGANVETGYYDQSQSNLTKTNTVLDELWDAFSTTPEVEIRNRLGAFLFSGDDVKKSVSMLSGGERARLLLAKLSMENNNFLILDEPTNHLDIDSKEVLENALIEFDGTLLFVSHDRYFINRVATKVLEISDKGSTLYLGDYDYYLTKKAELEELARLNEEEVSASKTEIDVTSDYETQKANQKEFRKITRRVVEIEARLEVLENDENNINGLMLETNDIGKLSDLQKELESIQEEQLLLMEEWENLNMRLDL

SEQ ID NO: 9777 - DNA, 966 bp, Streptococcus agalactiae
atggtaactctatctaaagaacaacacttggatatgtttctaaaaatgcaacgtattcgtgatgttgatatgaaatttaacaaattggttcgtcgtggtttcgtccaagggatgactcacttctctgttggtgaagaagctgcttcagtaggtgctatccaagatttaacagattcagatatcattttctcaaaccaccgtggacacggacaaactattgcaaaaggtattgatattggtggaatgtttgctgaacttgctggtaaagcaacaggaacatcaaaaggtcgtggaggctcaatgcacttagcaaaccttgaaaaaggtaactatggaacaaacggtatcgtcggtggaggatatgcgcttgcagtaggtgctgcccttacacagcaatatgaaggaactgataacattgttatcgccttttcgggtgactcagcgactaacgagggctcattccatgagtcagttaacttagctgctgtttggaacttaccagttatcttctttatcatcaacaaccgttatggtatctcaacagacatcacatactcaactaaaattcctcacctttacatgcgtgctgatgcgtacggtattccagggcattatgttgaagatggtaatgaccttatggctgtttacgagaaaatgcatgaagttatcaattacgtgcgttcaggaaatggaccagctattgtagaggttgaatcataccgttggtttggtcattcaactgctgatgctggggtataccgtactaaagaagaagttgattcatggaaagctaaagatccagtaaaacgctaccgtgcatacttaattgaaaatgaaatcgctactgaagaagagcttgcagctattgaagcacaagtgattaaagaagttgaagaaggggttaaattcgctgaagaaagtccattccctgatatgtctgttgcatttgaagacgtttttgtggac

SEQ ID NO: 9778 - protein, 322 aa, Streptococcus agalactiae
MVTLSKEQHLDMFLKMQRIRDVDMKFNKLVRRGFVQGMTHFSVGEEAASVGAIQDLTDSDIIFSNHRGHGQTIAKGIDIGGMFAELAGKATGTSKGRGGSMHLANLEKGNYGTNGIVGGGYALAVGAALTQQYEGTDNIVIAFSGDSATNEGSFHESVNLAAVWNLPVIFFIINNRYGISTDITYSTKIPHLYMRADAYGIPGHYVEDGNDLMAVYEKMHEVINYVRSGNGPAIVEVESYRWFGHSTADAGVYRTKEEVDSWKAKDPVKRYRAYLIENEIATEEELAAIEAQVIKEVEEGVKFAEESPFPDMSVAFEDVFVD

SEQ ID NO: 9779 - DNA, 858 bp, Streptococcus agalactiae
atgttagaagagtttggtgctaagcgcgttcgcgacacaccaatctcagaggctgcgattgcaggttcagctatcggtgctgcacaaacaggtttgcgtcctatcgttgatttgacattcatggattttgtaacaatcgcaatggatgctatcgttaaccaaggtgctaaaacgaattatatgtttggtggaggtctatcaactccagttactttccgtgtggcatcagggtcaggtattggttcggctgcacaacactcacaatcattagaagcttggttaacacacattccaggtctaaaagttgttgcacctggtactgttaatgagtcaaaagcacttttgaaatcttctattcttgacaataacccagttatcttcttagagccaaaagctctctatggtaagaaagaagaagttaatatggaccctgatttctatattccacttggtaaaggggatattaagcgtgaggggactgacttaacaattgtttcttatggccgtatgcttgagcgtgttatgcaagctgctgaagaagttgctgaggaaggtattaacgttgaggttgttgatccacgtacacttattccgcttgataaagaattaattatcgattctgttaagaaaactggtaaattgatcttggttaacgatgcttataaaactggtggtttcactggtgaaattgcaactatggttgctgaaagtgaagcatttgattaccttgatcatcctatcgtgcgtcttgcaagtgaagatgttccagtaccgtattcacgtgtacttgaacaaggaatcttacctgatgtagcaaaaattaaagatgctatctataaagtagttaacaaaggtaaa

SEQ ID NO: 9780 - protein, 286 aa, Streptococcus agalactiae
MLEEFGAKRVRDTPISEAAIAGSAIGAAQTGLRPIVDLTFMDFVTIAMDAIVNQGAKTNYMFGGGLSTPVTFRVASGSGIGSAAQHSQSLEAWLTHIPGLKVVAPGTVNESKALLKSSILDNNPVIFLEPKALYGKKEEVNMDPDFYIPLGKGDIKREGTDLTIVSYGRMLERVMQAAEEVAEEGINVEVVDPRTLIPLDKELIIDSVKKTGKLILVNDAYKTGGFTGEIATMVAESEAFDYLDHPIVRLASEDVPVPYSRVLEQGILPDVAKIKDAIYKVVNKGK

SEQ ID NO: 9781 - DNA, 1278 bp, Streptococcus agalactiae
atgggacgtggctctacttatccgggtagtttagcactcaaattcgataaagatatactagatacaattgccaaagattatgaaattgtagttgtgactggtactaacggtaaaaccttaacaacagctttaacagttggtattttaaaggaagccttcggtcaggtggtaaccaacccaagtggagcaaatatgattacaggtattgtttcgaccttcctaacagctaagaaaagtaaatctggtaaaaaaatagctgtccttgaaatagacgaagcgagtttaccccgtattacacagtatataaagcctagtttgttcgtctttaccaatattttccgtgatcaaatggaccgttatggcgaaatctacacaacttatcaaatgattttagatggagctgctaacgctccgcaagctactatcttagctaacggtgacagtccactttttaattctaaaagcgtgactaaccctgtgcaattctatggatttaataccgacaaacatgagccacgattagcacactataatactgagggtattctctgtccaaagtgtcaagcaattttaacttatcgattgaacacatatgccaaccttggtgactacacttgtcctaattgtgattttgaacgtccaaaccttgattatgccttaacaaggctaacacatctgacaaatacttcatcaggtttcgttattgatggccaacaatataatatcaacgtgggtggcctttataatatttacaatgctttggcggcagtatctgttgctgaatattttggtgtagaaccaagtcaaattaaggatggatttgataaaagccgtgccgtttttggtcgtcaagaaacctttacaattggaaataaaaaatgtactttagttctgattaaaaatccggtaggagctagtcaagctcttgatatgattaaacttgctccatacccgttctctctctcagtactactgaatgccaattatgctgacggtattgatacttcttggatttgggacgctaattttgaaactattctcacgatgaatatcccagaaatatttgctggtggtgttcgccactctgaaattgctcgtcgcttacgtgtaactggttatgatgagaaacgcataaaacaagctgataaactgcaagatattatgacaatgattgagcagcaagagactgagcatgcttatattttagcaacatatacagctatgctggagtttcgtgaaattcttgctaaccacaacgctatcagaaaggagatgaat

SEQ ID NO: 9782 - protein, 426 aa, Streptococcus agalactiae
MGRGSTYPGSLALKFDKDILDTIAKDYEIVVVTGTNGKTLTTALTVGILKEAFGQVVTNPSGANMITGIVSTFLTAKKSKSGKKIAVLEIDEASLPRITQYIKPSLFVFTNIFRDQMDRYGEIYTTYQMILDGAANAPQATILANGDSPLFNSKSVTNPVQFYGFNTDKHEPRLAHYNTEGILCPKCQAILTYRLNTYANLGDYTCPNCDFERPNLDYALTRLTHLTNTSSGFVIDGQQYNINVGGLYNIYNALAAVSVAEYFGVEPSQIKDGFDKSRAVFGRQETFTIGNKKCTLVLIKNPVGASQALDMIKLAPYPFSLSVLLNANYADGIDTSWIWDANFETILTMNIPEIFAGGVRHSEIARRLRVTGYDEKRIKQADKLQDIMTMIEQQETEHAYILATYTAMLEFREILANHNAIRKEMN

SEQ ID NO: 9783 - DNA, 324 bp, Streptococcus agalactiae
atgcgaatgattttaatgtttgatatgcctactgaaacagcagaagaacggaaggcgtatcgtaagtttagaaagtttctcttgagcgaaggctttatcatgcatcagttttctgtttatagtaaattattactcaataatacagctaataatgctatgataggtcggcttaaagtgaataatcctaaaaagggtaatatcacactcttaacagttacggaaaaacaatttgcgagaatggtttacctccatggagaacgcaacacaagtgttgccaactctgatagtcgcttggttttcctaggagattcttatgatcaagat

SEQ ID NO: 9784 - protein, 108 aa, Streptococcus agalactiae
MRMILMFDMPTETAEERKAYRKFRKFLLSEGFIMHQFSVYSKLLLNNTANNAMIGRLKVNNPKKGNITLLTVTEKQFARMVYLHGERNTSVANSDSRLVFLGDSYDQD

SEQ ID NO: 9785 - DNA, 609 bp, Streptococcus agalactiae
atggttcaccataaattaaaaaatgatccaagtggccatgactggtttcatattgttagagtaagaaatcttgcggtagaattagcacacaaagaaggggctaatacctttatttgtcaaatggctgcacttttgcatgatattattgatgacaaaatctgccaagatagtaagcaagcgtcgtatgaattgactcaatggttatatagtcaagatcttgccatagcagaagtagaacatatccttgatattcttgaaaatatttcattcaaagcaggaactggattgactatgaaaacattggaaggtcaaattgttcaagatgcagatcgcctagatgctatgggggctattggtattgcaagaacgatggcttattcagggagtaaaggacgtttaattcatgaccctaacttaaaaccacgagaaaacctcactttagaagagtatcgtaatggtcaggatacagctatcattcatttttacgaaaaattattaaagttaaaagaccttatgaatacaaaacaagggaaaatgcttgctcaaaaacgtcatgattttttagaactatatttagccgaattttatgctgaatggaatggtaaacgt

SEQ ID NO: 9786 - protein, 203 aa, Streptococcus agalactiae
MVHHKLKNDPSGHDWFHIVRVRNLAVELAHKEGANTFICQMAALLHDIIDDKICQDSKQASYELTQWLYSQDLAIAEVEHILDILENISFKAGTGLTMKTLEGQIVQDADRLDAMGAIGIARTMAYSGSKGRLIHDPNLKPRENLTLEEYRNGQDTAIIHFYEKLLKLKDLMNTKQGKMLAQKRHDFLELYLAEFYAEWNGKR

SEQ ID NO: 9787 - DNA, 1917 bp, Streptococcus agalactiae
atgaaaattattaatattggagttttagctcatgttgatgcaggaaaaactaccttaacagaaagcttattatataacagtggagcgattacagaattaggaagcgtggacaaaggtacaacgaggacggataatacgcttttagaacgtcagagaggaattacaattcagacaggaataacctcttttcagtgggaaaatacgaaggtgaacatcatagacacgccaggacatatggatttcttagcagaagtatatcgttcattatcagttttagatggggcaattctactgatttctgcaaaagatggcgtacaagcacaaactcgtatattatttcatgcacttaggaaaatggggattcccacaatcttttttatcaataagattgaccaaaatggaattgatttatcaacggtttatcaggatattaaagagaaactttctgccgaaattgtaatcaaacagaaggtagaactgtatcctaatatgtgtgtgacgaactttaccgaatctgaacaatgggatacggtaatagagggaaacgatgaccttttagagaaatatatgtccggtaaatcattagaagcattggaactcgaacaagaggaaagcataagatttcataattgttccctgttccctgtttatcacggaagtgcaaaaaacaatatagggattgataaccttatagaagtgattacgaataaattttattcatcaacacatcgaggtccgtctgaactttgcggaaatgttttcaaaattgaatatacaaaaaaaagacaacgtcttgcatatatacgcctttatagtggagtactacatttacgagattcggttagagtatcagaaaaagaaaaaataaaagttacagaaatgtatacttcaataaatggtgaattatgtaagattgatagagcttattctggagaaattgttattttgcaaaatgagtttttgaagttaaatagtgttcttggagatacaaaactattgccacagagaaaaaagattgaaaatccgcaccctctactacaaacaactgttgaaccgagtaaacctgaacagagagaaatgttgcttgatgcccttttggaaatctcagatagtgatccgcttctacgatattacgtggattctacgacacatgaaattatactttctttcttagggaaagtacaaatggaagtgattagtgcactgttgcaagaaaagtatcatgtggagatagaactaaaagagcctacagtcatttatatggagagaccgttaaaaaatgcagaatataccattcacatcgaagtgccgccaaatcctttctgggcttccattggtttatctgtatcaccgcttccgttgggaagtggaatgcagtatgagagctcggtttctcttggatacttaaatcaatcatttcaaaatgcagttatggaagggatacgctatggttgcgaacaaggattatatggttggaatgtgacggattgtaaaatctgttttaagtatggcttatactatagccctgttagtaccccagcagattttcggatgcttgctcctattgtattggaacaagtcttaaaaaaagctggaacagaattgttagagccatatcttagttttaaaatttatgcgccacaggaatatctttcacgagcatacaacgatgctcctaaatattgtgcgaacatcgtagacactcaattgaaaaataatgaggtcattcttagtggagaaatccctgctcggtgtattcaagaatatcgtagtgatttaactttctttacaaatggacgtagtgtttgtttaacagagttaaaagggtaccatgttactaccggtgaacctgtttgccagccccgtcgtccaaatagtcggatagataaagtacgatatatgttcaataaaataact

SEQ ID NO: 9788 - protein, 639 aa, Streptococcus agalactiae
MKIINIGVLAHVDAGKTTLTESLLYNSGAITELGSVDKGTTRTDNTLLERQRGITIQTGITSFQWENTKVNIIDTPGHMDFLAEVYRSLSVLDGAILLISAKDGVQAQTRILFHALRKMGIPTIFFINKIDQNGIDLSTVYQDIKEKLSAEIVIKQKVELYPNMCVTNFTESEQWDTVIEGNDDLLEKYMSGKSLEALELEQEESIRFHNCSLFPVYHGSAKNNIGIDNLIEVITNKFYSSTHRGPSELCGNVFKIEYTKKRQRLAYIRLYSGVLHLRDSVRVSEKEKIKVTEMYTSINGELCKIDRAYSGEIVILQNEFLKLNSVLGDTKLLPQRKKIENPHPLLQTTVEPSKPEQREMLLDALLEISDSDPLLRYYVDSTTHEIILSFLGKVQMEVISALLQEKYHVEIELKEPTVIYMERPLKNAEYTIHIEVPPNPFWASIGLSVSPLPLGSGMQYESSVSLGYLNQSFQNAVMEGIRYGCEQGLYGWNVTDCKICFKYGLYYSPVSTPADFRMLAPIVLEQVLKKAGTELLEPYLSFKIYAPQEYLSRAYNDAPKYCANIVDTQLKNNEVILSGEIPARCIQEYRSDLTFFTNGRSVCLTELKGYHVTTGEPVCQPRRPNSRIDKVRYMFNKIT

SEQ ID NO: 9789 - DNA, 912 bp, Streptococcus agalactiae
atgatgaaatttagaaaaaatcagaataaagaaaaacagataccaaaggaaaagaaacctcgtgtctataaggtcaatcctcataaaaaggttgtgattgccttgtgggtacttttagggcttagtttcagctttgcgatattcaagcactttacagctatagatactcatactattcacgaaacaactatcatagaaaaggaatacgttgatactcatcatgtagaaaattttgtagagaactttgcgaaagtctactattcatgggagcaatccgataagtccattgataatcgaatggaaagtctaaaaggctatctgacagatgaacttcaagctctcaatgttgatacagtacgcaaagatattcctgtatcgtcttctgtaagaggatttcagatatggacggtagagccaactggcgacaatgagtttaatgtaacctacagtgtagaccagctcattacagagggagaaaatacaaagaccgtccactctgcttatatagtgagtgtctatgtagatggttctggaaatatggtactggttaagaatccgaccattaccaacatacctaagaaatcaagttataaaccaaaagccattgaaagtgaggggacggttgattccattacaaccaatgaaatcaatgagtttttaacgacgttcttcaagctctatcctacagcgacagccagtgaactttcctactatgtgaatgacgggatattaaaaccaatcggaaaagagtacatctttcaagaactggtaaatcctattcacaatcgtaaggataatcaagtcacggtatcgctgacagtggagtatatcgaccagcagaccaaagcaacgcaggtatctcaatttgatttggtacttgaaaagaacgggagtaattggaagattgtaaaa

SEQ ID NO: 9790 - protein, 304 aa, Streptococcus agalactiae
MMKFRKNQNKEKQIPKEKKPRVYKVNPHKKVVIALWVLLGLSFSFAIFKHFTAIDTHTIHETTIIEKEYVDTHHVENFVENFAKVYYSWEQSDKSIDNRMESLKGYLTDELQALNVDTVRKDIPVSSSVRGFQIWTVEPTGDNEFNVTYSVDQLITEGENTKTVHSAYIVSVYVDGSGNMVLVKNPTITNIPKKSSYKPKAIESEGTVDSITTNEINEFLTTFFKLYPTATASELSYYVNDGILKPIGKEYIFQELVNPIHNRKDNQVTVSLTVEYIDQQTKATQVSQFDLVLEKNGSNWKIVK

SEQ ID NO: 9791 - DNA, 924 bp, Streptococcus agalactiae
atggcatatccaattaaatacattgaaaacaatctcgtctggaataaagacggggaatgttatgcttactatgagcttgttccttacaattactcatttctaagtccagaacagaaaatacaagtgcatgattctttcagacagcttatcgcacaaaatcgtgatggcaaaattcatgctttacaaatcagtacagaatccagcatacgttctgcacaagagcgttccaaaaatgaagtcactggcaagctcaaagcggttgcctatgacaaaatcgaccaacagacagacgctttaatatccatgattggcgaaaatcaagtgaactaccgtttctttatcggctttaagttgcttctcaacgatcaggagttttctatgaaaagtcttaccgttgaagcaaaaaatgctttgtctgattttgtctatgatgtgaaccataagctgatgggcgattttgttagtatgagtaatgatgaaatcctgcgttttcagaagatggaaaagctcttagaaaataaaatctctcgtcgtttcaaaatccgcaggttagataaggacgacttcggctatctgattgaacacctttacggacagacaggcactgcctatgaagagtatgagtaccatctatcaaagaaaaagctggataatgaaacgctgattaaatactatgacttgattaagcctactcgctgtttggtggaagaaaaacagcgatatttgaaaatccagcaggaagatgaaaccgtctatgtagcttactttaccattaacagcattgtcggagaactggacttcccgtcctctgaaatcttctactaccagcaacagcaatttacattcccgattgatacgtcaatgaatgtggaaattgtagcgaatcgtaaagccctatctactgtccgcaaaaaaagaaagaac

SEQ ID NO: 9792 - protein, 308 aa, Streptococcus agalactiae
MAYPIKYIENNLVWNKDGECYAYYELVPYNYSFLSPEQKIQVHDSFRQLIAQNRDGKIHALQISTESSIRSAQERSKNEVTGKLKAVAYDKIDQQTDALISMIGENQVNYRFFIGFKLLLNDQEFSMKSLTVEAKNALSDFVYDVNHKLMGDFVSMSNDEILRFQKMEKLLENKISRRFKIRRLDKDDFGYLIEHLYGQTGTAYEEYEYHLSKKKLDNETLIKYYDLIKPTRCLVEEKQRYLKIQQEDETVYVAYFTINSIVGELDFPSSEIFYYQQQQFTFPIDTSMNVEIVANRKALSTVRKKRKN

SEQ ID NO: 9793 - DNA, 1146 bp, Streptococcus agalactiae
ttggcttatggactatctcaaaaccgtttagctgttgcgactggtattacaaggcagtatctaagcgatattgaaacaggaaaagtcaagccatcagaggatttacagcagtccctttgggaagctctggaacgcttcaatcccgacgctccccttgaaatgctgtttgattatgtaagaattcgctttccgacaacagacgtacagcaggtggtcgaaaacatcttacaactgaaactgtcctattttcttcatgaggactatggtttctattcttattcagagcattatgctttaggcgacatattcgtcctttgctcccatgaactggacaaaggagttctggtggaattgaaaggtcgtgggtgcagacaatttgaaagctatcttctggcacaacaaagaagctggtatgagttctttatggacgttttggtggctggcggtgtgatgaaacgccttgaccttgccattaacgataagacagggattttaaatatccctgtactcactgaaaagtgccaacaggaagaatgtatctccgtcttccgcagttttaaaagctatcgcagtggcgaactggtacgcaaagaggaaaaggaatgtatgggaaacaccctctatatcggttcattacaaagtgaagtttatttctgtatctatgaaaaggactacgagcagtacaagaaaaatgatattcccattgaagacgcagaagtaaaaaaccgttttgagattcgattgaaaaatgagcgtgcctattatgcagtccgtgatttactcgtctatgacaatccagagcataccgcctttaaaattatcaatcggtatatccgttttgtagataaagacgattccaaacctcgttctgattggaaactgaatgaagaatgggcttggtttattgggaacaatcgtgaacgattaaaactaaccacaaaaccagagccttactccttccaaaggacgctgaactggctatctcatcaagttgccccgaccttaaaggttgcgattaaacttgatgaaatcaaccagacgcaggttgtaaaagacattctcgaccatgcgaaactgacagaccgacacaagcagattttgaagcaacagtcagtaaaagaacaggacgtgataacaacaaaaaaa

SEQ ID NO: 9794 - protein, 382 aa, Streptococcus agalactiae
MAYGLSQNRLAVATGITRQYLSDIETGKVKPSEDLQQSLWEALERFNPDAPLEMLFDYVRIRFPTTDVQQVVENILQLKLSYFLHEDYGFYSYSEHYALGDIFVLCSHELDKGVLVELKGRGCRQFESYLLAQQRSWYEFFMDVLVAGGVMKRLDLAINDKTGILNIPVLTEKCQQEECISVFRSFKSYRSGELVRKEEKECMGNTLYIGSLQSEVYFCIYEKDYEQYKKNDIPIEDAEVKNRFEIRLKNERAYYAVRDLLVYDNPEHTAFKIINRYIRFVDKDDSKPRSDWKLNEEWAWFIGNNRERLKLTTKPEPYSFQRTLNWLSHQVAPTLKVAIKLDEINQTQVVKDILDHAKLTDRHKQILKQQSVKEQDVITTKK

SEQ ID NO: 9795 - DNA, 1296 bp, Streptococcus agalactiae
atggctactgttcgtaaagcagaagagattgcaggacaaaaagttggcttcctccttgatactaaaggacctgaaattcgtacagaactttttgaagatggtgcagatttccattcatatacaacaggtacaaaattacgtgttgctactaagcaaggtatcaaatcaactccagaagtgattgcattgaatgttgctggtggacttgacatctttgatgacgttgaagttggtaagcaaatccttgttgatgatggtaaactaggtcttactgtgtttgcaaaagataaagacactcgtgaatttgaagtagttgttgagaatgatggccttattggtaaacaaaaaggtgtaaacatcccttatactaaaattcctttcccagcacttgcagaacgcgataatgctgatatccgttttggacttgagcaaggacttaactttattgctatctcatttgtacgtactgctaaagatgttaatgaagttcgtgctatttgtgaagaaactggcaatggacacgttaagttgtttgctaaaattgaaaatcaacaaggtatcgataatattgatgagattatcgaagcagcagatggtattatgattgctcgtggtgatatgggtatcgaagttccatttgaaatggttccagtttaccaaaaaatgatcattactaaagttaatgcagctggtaaagcagttattacagcaacaaatatgcttgaaacaatgactgataaaccacgtgcgactcgttcagaagtatctgatgtcttcaatgctgttattgatggtactgatgctacaatgctttcaggtgagtcagctaatggtaaatacccagttgagtcagttcgtacaatggctactattgataaaaatgctcaaacattactcaatgagtatggtcgcttagactcatctgcattcccacgtaataacaaaactgatgttattgcatctgcggttaaagatgcaacacactcaatggatatcaaacttgttgtaacaattactgaaacaggtaatacagctcgtgccatttctaaattccgtccagatgcagacattttggctgttacatttgatgaaaaagtacaacgttcattgatgattaactggggtgttatccctgtccttgcagacaaaccagcatctacagatgatatgtttgaggttgcagaacgtgtagcacttgaagcaggatttgttgaatcaggcgataatatcgttatcgttgcaggtgttcctgtaggtacaggtggaactaacacaatgcgtgttcgtactgttaaa

SEQ ID NO: 9796 - protein, 432 aa, Streptococcus agalactiae
MATVRKAEEIAGQKVGFLLDTKGPEIRTELFEDGADFHSYTTGTKLRVATKQGIKSTPEVIALNVAGGLDIFDDVEVGKQILVDDGKLGLTVFAKDKDTREFEVVVENDGLIGKQKGVNIPYTKIPFPALAERDNADIRFGLEQGLNFIAISFVRTAKDVNEVRAICEETGNGHVKLFAKIENQQGIDNIDEIIEAADGIMIARGDMGIEVPFEMVPVYQKMIITKVNAAGKAVITATNMLETMTDKPRATRSEVSDVFNAVIDGTDATMLSGESANGKYPVESVRTMATIDKNAQTLLNEYGRLDSSAFPRNNKTDVIASAVKDATHSMDIKLVVTITETGNTARAISKFRPDADILAVTFDEKVQRSLMINWGVIPVLADKPASTDDMFEVAERVALEAGFVESGDNIVIVAGVPVGTGGTNTMRVRTVK

SEQ ID NO: 9797 - DNA, 555 bp, Streptococcus agalactiae
atggttaaacgcgattttattagaaatattattttagcattgattgctgtattgattttgattctcttgagatattttgtttttgcaacctttaaagtacataaggatgctacaaattcttattttagcaacggagatgttgttgttgttaatcgtaataggacgcctaagtacaaagactttattgtctataaggttggaaagattttctatattagtcgtgttattggtgagccaaatcaaaaagtgagagtaatggatgatattttatatttgaatgatgttttcaaggatgagccttacattgaaaaaatgaaaaatgcttattctgaaaagaaagacggtcaaatgccctttacttccgacttctcagttgaaacattaacacgaaataaagaaagcagagttcctaagggttcttatcttgtgttaaatgataatcgacaaaataaaaatgatagtcgaaaatttggattaatcaaagagaaagatattcgtggtgttattacctttaaagtataccctctaagtgaatttggttttacagcttcagag

SEQ ID NO: 9798 - protein, 185 aa, Streptococcus agalactiae; identical to SEQ ID NO: 8790

SEQ ID NO: 9799 - DNA, 468 bp, Streptococcus agalactiae
atgatagattatggtagtcaagtccttctaaatagtttacattttgaaaaaaataaatccttgttagaccttgggtgtggatacggtccgctgggaatttctctagccaaagtgcaaggagttaaagcaactatggttgacattaatacgagagcattggaattagctaagaaaaatgcaacacgcaatggagtagtagttgaagtctttcagtcaaacatttatgaaaatatttctaaaactttcgactatattataagcaacccacctattcgtgctggaaagcaagttgttcattctattatcgaagaaagtatctgttaccttaatacaggcggtagccttaccattgtcattcaaaagaaacaaggcgctccaagtgcaaaagctaaaatgctagatacttttggtaattgcgatattttaaaaaaagataagggatattatatattgagaagtgaaaaagtc

SEQ ID NO: 9800 - protein, 156 aa, Streptococcus agalactiae
MIDYGSQVLLNSLHFEKNKSLLDLGCGYGPLGISLAKVQGVKATMVDINTRALELAKKNATRNGVVVEVFQSNIYENISKTFDYIISNPPIRAGKQVVHSIIEESICYLNTGGSLTIVIQKKQGAPSAKAKMLDTFGNCDILKKDKGYYILRSEKV

SEQ ID NO: 9801 - DNA, 414 bp, Streptococcus agalactiae
atgaagcgaaaggtgcagctactaaaaatgggaaatatagagttgaaaaaattggctgtaaaagcgagtgaaaatgcatacgttccttactcgaaatttccagtaggcgcagcattgcgtacagcagaaggaaaaatatttacaggatgtaacgttgaaaatatcagttatggattagcaaactgtgctgagcgtactgcaatttttaaagctgtttcagaaggttataaagatttttcggaaattgctatttatggaaatactgaagaaccaatttctccttgcggtgcatgccgtcaagtgatggtggaattttttaataagaatgctaaagttacattgattgctaaaaatggtaagacggtcgagacgacggtcggtgagttgttaccatactcgtttgttgatttaaaa

SEQ ID NO: 9802 - protein, 138 aa, Streptococcus agalactiae
MKRKVQLLKMGNIELKKLAVKASENAYVPYSKFPVGAALRTAEGKIFTGCNVENISYGLANCAERTAIFKAVSEGYKDFSEIAIYGNTEEPISPCGACRQVMVEFFNKNAKVTLIAKNGKTVETTVGELLPYSFVDLK

SEQ ID NO: 9803 - DNA, 1533 bp, Streptococcus agalactiae
atgacacagaatgtcattgaaatgaaagaaatcactaagaaattcggtgattttgtggcaaatgatcatatcaatttgacggttgaaaaaggtgagatacatgctctgcttggcgaaaacggtgcagggaaatcaactttaatgaacatgttagcaggtttactagaaccaacagacggtcaaatttttattaatggtcagcctgtaactattgattcaccttccaaatcgtcacaattggggattggtatggtacatcagcatttcatgcttgttgaagcatttactgtagctgaaaatattgttctaggaaatgaaaccacccaaaatggtgttttagacattaagacagcagctaaagaaataaaggaactatcagagaaatatggtttgtcagtaaatccaaatgctaaaatatctgatatttctgtaggagcacagcagcgtgttgaaattttgaagacactttatcgcggtgcagatattttaatttttgatgagccgacggcggtgcttacaccatcagaaataaaagaattgatgacaattatgaagagccttgttaaagaaggcaaatccattatactaattacccataaattggatgaaattcgggcagttgctgataaagttactgtgattcgccgtggtaaaagtattgaaacagtccctgttgcaggcgcaagttctcaacaactggcggaaatgatggttggacgatctgtttccttcagaactgaaaaaaaggaagctaatccgactgacataatcctttctgtaaaggatttagttgtagaagaaaatagaggcggcgttctagctgttaaaaatctgtcgttagatgttcgagcaggtgaaattgtaggtatagctggtattgatggtaatggacaaagtgaattaattcaagctattacaggtttaagaaaggtaacttctggtcaaattgtaattaaaggtaaagatgtcacaaaattttcaagtcgacaaattacagaattaagtgtaggtcatgttccagaagatcgtcatagagatggtttggttctagatatgacgatggcagaaaatttagctttacaaacttattataaagagccattgagtcataaaggtatccttaattttgctaaaattaaagagtatgctcgtcaattaatgacagaatttgatgtgcgtggtgctggtgaacatgttttagcaagaggattttctggtggtaaccaacaaaaagcaattattgctcgtgaagtggatcgcgatccagacctactcattgttagccaaccgactcgtggtctagatgttggtgctatcgagtatattcataaacgtttgattgaagagcgcgataaagggaaagcggtcttagtagttagctttgagttagatgaaatcttaaacttatcagatcgtattgcagttattcatgatggtaaaattcaaggaattgttaaacccgaccaaaccaacaagcaagaattgggtattttgatggctggtggaaaaattgaaaaggaggagagagatgtc

SEQ ID NO: 9804 - protein, 511 aa, Streptococcus agalactiae
MTQNVIEMKEITKKFGDFVANDHINLTVEKGEIHALLGENGAGKSTLMNMLAGLLEPTDGQIFINGQPVTIDSPSKSSQLGIGMVHQHFMLVEAFTVAENIVLGNETTQNGVLDIKTAAKEIKELSEKYGLSVNPNAKISDISVGAQQRVEILKTLYRGADILIFDEPTAVLTPSEIKELMTIMKSLVKEGKSIILITHKLDEIRAVADKVTVIRRGKSIETVPVAGASSQQLAEMMVGRSVSFRTEKKEANPTDIILSVKDLVVEENRGGVLAVKNLSLDVRAGEIVGIAGIDGNGQSELIQAITGLRKVTSGQIVIKGKDVTKFSSRQITELSVGHVPEDRHRDGLVLDMTMAENLALQTYYKEPLSHKGILNFAKIKEYARQLMTEFDVRGAGEHVLARGFSGGNQQKAIIAREVDRDPDLLIVSQPTRGLDVGAIEYIHKRLIEERDKGKAVLVVSFELDEILNLSDRIAVIHDGKIQGIVKPDQTNKQELGILMAGGKIEKEERDV

SEQ ID NO: 9805 - DNA, 822 bp, Streptococcus agalactiae
atggtaattggagctttctcaggcgttgtatttaatttagagtttgcttctgtttttggtgatgcgactccatggatttctgtactagttggtggtttagttggtttaattttttctgttatccatgcagttgcgacagttaattttcgtgcagatcatattatcagcggaaccgttcttaatttaatggcaccttcattagctgttttcttgattaaggttctttataataaaggtcaaactgataatattcaagaatcatttggaaaatttaatttccctatactatcagatattccttttgttggtgatatcttctttaaaggaacaagcttagtcggttatattgctattcttttctcattccttgcttggtttattctatataaaactcgctttggattaagattacgctcagttggagaacatcctcaagcagcagacaccttaggtattaatgtttatcttatgcgttactctggtgtcttgatttcaggtttccttggtggaataggaggagctgtatatgctcaatctatttctgttaactttgcagcgacaactatattaggaccgggctttatctccttagcggcgatgatttttggtaagtggaatccaattggtgcaatgcttgctagtctattctttggtttatcgcaaagtttagcagttatcggtagccatttaccacttttgagcaatattccaacagtttatctacaaattgctccatatgtcctcactatcattgtattagcagctttctttggacaagcagtagctcctaaggcggatggtattaattatattaaaacgaaa

SEQ ID NO: 9806 - protein, 274 aa, Streptococcus agalactiae
MVIGAFSGVVFNLEFASVFGDATPWISVLVGGLVGLIFSVIHAVATVNFRADHIISGTVLNLMAPSLAVFLIKVLYNKGQTDNIQESFGKFNFPILSDIPFVGDIFFKGTSLVGYIAILFSFLAWFILYKTRFGLRLRSVGEHPQAADTLGINVYLMRYSGVLISGFLGGIGGAVYAQSISVNFAATTILGPGFISLAAMIFGKWNPIGAMLASLFFGLSQSLAVIGSHLPLLSNIPTVYLQIAPYVLTIIVLAAFFGQAVAPKADGINYIKTK

SEQ ID NO: 9807 - DNA, 741 bp, Streptococcus agalactiae
atgcactataaagaattacttgagtcatccgaaaaagcttatttggaaactaatcggtataaacattttaagaatataatcatttcagagcgttatttttcaaactatattagctacaaaataatgcctacagtaagtgagtttttacaggatatgatctatttagcagatgaacaaaaagattatcagtctgattttgcttttgtattttttgaggaaaatgctgaattgagcagtgaattacagagaactttatcacaacaaggctttgaatcagagaaacatatcatatttacaaattcattaaatcatcttaaactttttgaaaaagaatttgatgacatcacatttactaaacttaatgaaaattacctagaaaaatacctaaagttcaaatataaacaaagtatagtttacggagaaatttacgctaagcaaatgtataatgataatcgtgttaatcttttaaataataatgctaaagtttacctagctattaaagataatcaaattattggagatgtaacagcttgggactatggtgaatacgtggaaatagatgatttttatgtccaagagtcctacagaggacaaggaattggtacgcgcctacaatttgatgcaagtagggggtttaagaaagttatcttaatttcagaagaagaaaacagaaaaatgtatgagcaccaaggttatgaggaagtcgcctattattggaccgctttacggagccctcgaaag

SEQ ID NO: 9808 - protein, 247 aa, Streptococcus agalactiae
MHYKELLESSEKAYLETNRYKHFKNIIISERYFSNYISYKIMPTVSEFLQDMIYLADEQKDYQSDFAFVFFEENAELSSELQRTLSQQGFESEKHIIFTNSLNHLKLFEKEFDDITFTKLNENYLEKYLKFKYKQSIVYGEIYAKQMYNDNRVNLLNNNAKVYLAIKDNQIIGDVTAWDYGEYVEIDDFYVQESYRGQGIGTRLQFDASRGFKKVILISEEENRKMYEHQGYEEVAYYWTALRSPRK

SEQ ID NO: 9809 - DNA, 1953 bp, Streptococcus agalactiae
atgttttatctcaaaatagcctggcataatttaaaacattctatagaccagtacataccattcctcttagccagtttattactttattcattgacttgttctacgctactaatcttaatgagtgctgttggaagagatatggggacagcggcaacggttctttttcttggagtgattgttttgtcaatctttgcggtagtcatggaacattatagctacaatatcttgatgaaacagcgtagtagtgaatttggactgtataacattttggggatgaataaacgtcaagttgcgcgtgtagctagtctagagctgtttattatttatatatttcttatttctataggaagtctgtttagtgctttttttgctaaatttatttatttaatttttgtcaacattattaactatcatgcactaaatcttagtttaagtttatggccatttattatttgtatcgttatatttacaggtatttttctgactttagaagttccagttattcgacatgttcatttatcatccccattaagtctttttagaaagaaacaacagggagaaaaagaaccaaaaggtaatcttatacttgcaattttagcgttagtagctatcgccatcgcttatacaatggctcttacttcaggtaaagcacctgcattagctgttatctatcgtttcttctttgcagtacttttagttattgctggtacttatcttttttatattagttttatgacatggtacttaaaaaggttgcgtcaaaacaagcattattattataaatctgagcattttgtatcaacttcgcaaatgatttttcgaatgaagcaaaatgcagtagggttagcaagtatcactttattagctgttatggctctagttactattgctacaacagtctcactttattcaaatacacaaaatgttgttaccggactatttccaaaatcagtaagtttatcaatagataattcaaaaggtgacgcgaaaaatatatttgaagaaaagattttgaagaaactaggtaagtcatctaaggaagctatcacttataatcagacaatgatttcgatgccagttagtcaatcaagtgaacttaatatcacatctaaaaacgtcaaacatgttgatatcacaaaaacgggttttatgtacctaattactcagaatgatttccgtcgtttaggtcaccaattaccaaaattaaaagataaccaagtggcttactttgttcaaaaaggtgatagccgtttgaaaaaaataaatctattgggaaataaatttgacgttgtaaaaaatttaaaagaggcttatgtcccagagactacaaatacttacaacccgggtttgattatatttgcaaacaacaaacaaattgacaatattagaaaagcatatttaccttatactaagaacatcaatacttttccaaaaacctttaaggcatatttggatttgaatagtcaagagataaattcaatttctaaaaacgacataatagaggtagatggtaagtatgttggaaatattagcactaaacagagttttctaaaagaaggttatcaaatgtttggtgggttattatttactggatttctgttaggtataagctttttgctaggtatagctctaattgtttactataagcaatactcagaaggtcatgaagataagagatcttatcgtatcttacaagaagtaggtatgagcaaaaaattagttaaacggactattaattctcaaattatgattttcttcttccaacctttagtggtagcagttattcactttggagttgctattccaatgctaaaacagatgcttttggtatttggggtgcttaactcaacaatcgtatatgtagtaagtggtttgacagtacttgcgatttctataatttactttatcatttaccgtataactagtcgaacttattatcatattattgaacgc

SEQ ID NO: 9810 - protein, 651 aa, Streptococcus agalactiae
MFYLKIAWHNLKHSIDQYIPFLLASLLLYSLTCSTLLILMSAVGRDMGTAATVLFLGVIVLSIFAVVMEHYSYNILMKQRSSEFGLYNILGMNKRQVARVASLELFIIYIFLISIGSLFSAFFAKFIYLIFVNIINYHALNLSLSLWPFIICIVIFTGIFLTLEVPVIRHVHLSSPLSLFRKKQQGEKEPKGNLILAILALVAIAIAYTMALTSGKAPALAVIYRFFFAVLLVIAGTYLFYISFMTWYLKRLRQNKHYYYKSEHFVSTSQMIFRMKQNAVGLASITLLAVMALVTIATTVSLYSNTQNVVTGLFPKSVSLSIDNSKGDAKNIFEEKILKKLGKSSKEAITYNQTMISMPVSQSSELNITSKNVKHVDITKTGFMYLITQNDFRRLGHQLPKLKDNQVAYFVQKGDSRLKKINLLGNKFDVVKNLKEAYVPETTNTYNPGLIIFANNKQIDNIRKAYLPYTKNINTFPKTFKAYLDLNSQEINSISKNDIIEVDGKYVGNISTKQSFLKEGYQMFGGLLFTGFLLGISFLLGIALIVYYKQYSEGHEDKRSYRILQEVGMSKKLVKRTINSQIMIFFFQPLVVAVIHFGVAIPMLKQMLLVFGVLNSTIVYVVSGLTVLAISIIYFIIYRITSRTYYHIIER

SEQ ID NO: 9811 - DNA, 684 bp, Streptococcus agalactiae
atgtatttagcattaatcggtgatatcattaattcaaaacagatacttgaacgtgaaactttccaacagtcttttcagcaactaatgaccgaactatctgatgtatatggtgaagagctgatttctccattcactattacagctggtgatgaatttcaagctttattgaaaccatcaaaaaaggtatttcaaattattgaccatattcaactagctctaaaacctgttaatgtaaggttcggcctcggtacaggaaacattataacatccatcaattcaaatgaaagtatcggtgctgatggtcctgcctactggcatgctcgctcagctattaatcatatacatgataaaaatgattatggaacagttcaagtagctatttgccttgatgatgaagaccaaaaccttgaattaacactaaatagtctcatttcagctggtgattttatcaagtcaaaatggactacaaaccattttcaaatgcttgagcacttaatacttcaagataattatcaagaacaatttcaacatcaaaagttagcccaactggaaaatattgaacctagtgcgctgactaaacgccttaaagcaagcggtctgaagatttacttaagaacgagaacacaggcagccgatctattagttaaaagttgcactcaaactaaagggggaagctatgatttc

SEQ ID NO: 9812 - protein, 228 aa, Streptococcus agalactiae
MYLALIGDIINSKQILERETFQQSFQQLMTELSDVYGEELISPFTITAGDEFQALLKPSKKVFQIIDHIQLALKPVNVRFGLGTGNIITSINSNESIGADGPAYWHARSAINHIHDKNDYGTVQVAICLDDEDQNLELTLNSLISAGDFIKSKWTTNHFQMLEHLILQDNYQEQFQHQKLAQLENIEPSALTKRLKASGLKIYLRTRTQAADLLVKSCTQTKGGSYDF

SEQ ID NO: 9813 - DNA, 306 bp, Streptococcus agalactiae
atgaatgccctttttgagttttatgcggcattattaacagataaacaaatgaattatatcgagttatactacgccgatgactacagccttgctgaaatagctgaagaatccggtgttagccgacaagctgtctatgataatatcaaacgaactgaaaaaattcttgaggcgtacgaaatgaaactacatatgtattcagattatattgtccgtagtcagatttttgatgacattctagaaaaatataccgatgatgcctttttacaagaaaaaatttccattctaagtagcattgataatagagat

SEQ ID NO: 9814 - protein, 102 aa, Streptococcus agalactiae
MNALFEFYAALLTDKQMNYIELYYADDYSLAEIAEESGVSRQAVYDNIKRTEKILEAYEMKLHMYSDYIVRSQIFDDILEKYTDDAFLQEKISILSSIDNRD

SEQ ID NO: 9815 - DNA, 555 bp, Streptococcus agalactiae
atgtataacggacataatgtttatagcccgcgcactgataccgtagaacttcgtaaagaaattgggatggtttttcagcagcctaatccatttcctatgtcagtatttgaaaatgttgtttatggtcttagactcaaaggaataaaagacaaagctacgttagatgaagccgtagagacttcattgaagggcgcgtctatctgggacgaggtcaaagatagattacacgactctgctcttggtttatctggtggtcaacaacaacgtgtttgtattgccagaacccttgctaccaagcctaaaattatccttctagatgagccaacctctgcacttgacccaatttctgctggtaaaattgaagagactttacatggtctaaaagatcaatataccatgttacttgttacacgttctatgcagcaagcctcacgtatttctgatcgtacaggtttcttcttagacggtaacttaattgaatatggcaatacaaaagaaatgtttatgaatcctaaacataaagaaactgaagattacattacaggtaaattcggt

SEQ ID NO: 9816 - protein, 185 aa, Streptococcus agalactiae
MYNGHNVYSPRTDTVELRKEIGMVFQQPNPFPMSVFENVVYGLRLKGIKDKATLDEAVETSLKGASIWDEVKDRLHDSALGLSGGQQQRVCIARTLATKPKIILLDEPTSALDPISAGKIEETLHGLKDQYTMLLVTRSMQQASRISDRTGFFLDGNLIEYGNTKEMFMNPKHKETEDYITGKFG

SEQ ID NO: 9817 - DNA, 843 bp, Streptococcus agalactiae
atgacatcacacgatgctgtattcaagcttcgaaagatattacatacaaaaaaaataggacacggcggaactcttgatccagatgttgttggggttttaccaattgcggttggaaaagccactcgtgttattgaatatatgacagaaagtggcaaaatttatgaaggagaaatcactttaggatatgccacaagtacagaagattctagtggagaggtcatttcaagaactccactaactcaatccgatcttagcgaggatgttgtggatcatgcgatgaaaagttttaccggtccaattacacaagttcctcctatgtattcagcagttaaagtaaatggtaaaaaactctatgaatatgctcgttcaggagaagaagtagagcgacctaaacgacaaataacaatttctgaatttagacgcacaagcccattgtacttcgaaaaaggcatctgccgttttagtttctatgtctcatgcagtaaaggtacctatgttaggacgttagctgttgatctaggaataaaactaggatatgctagccatatgtctttcctaaaaagaacctcatctgcaggattatctattacacaatcattaacgcttgaagaaattaatgaaaaatataagcaagaagatttttcatttttacttccaattgaatatggtgttttagatctcccaaaagttaacctaactgaggaagataaagttgaaatctcatacggacgtcgtatcttattagaaaatgaagcagataccttagcagctttttatgaaaatagagttatcgctatactagaaaaacgtggcaatgaatttaaaccacacaaagtattgtta

SEQ ID NO: 9818 - protein, 281 aa, Streptococcus agalactiae
MTSHDAVFKLRKILHTKKIGHGGTLDPDVVGVLPIAVGKATRVIEYMTESGKIYEGEITLGYATSTEDSSGEVISRTPLTQSDLSEDVVDHAMKSFTGPITQVPPMYSAVKVNGKKLYEYARSGEEVERPKRQITISEFRRTSPLYFEKGICRFSFYVSCSKGTYVRTLAVDLGIKLGYASHMSFLKRTSSAGLSITQSLTLEEINEKYKQEDFSFLLPIEYGVLDLPKVNLTEEDKVEISYGRRILLENEADTLAAFYENRVIAILEKRGNEFKPHKVLL

SEQ ID NO: 9819 - DNA, 429 bp, Streptococcus agalactiae
atgaagattagaactgctacactagacgatagtgaaaaattagtccctttgtatcaagaattaggatacgcaatatcattatcagagattcaatctattttaaaggttattcttactcattcagattatggctttttgatagctgaggataatggcaaactcctcgccttcgttggatatcataaactttacttttttgaaaaaagtgggacttactatcgtattttagcactagtagttaatgaaaagcaccgtcgtaaaggcatcgctagtcaacttattaatcacgttaaacagctagctaaaacagatggaagtgaagtactggctttaaatagcagtttaaaagaatatcgtcaggaagcttatcatttttatgaaaacctagggttcaagaaggttagtacaggcttttcatactatttagat

SEQ ID NO: 9820 - protein, 143 aa, Streptococcus agalactiae
MKIRTATLDDSEKLVPLYQELGYAISLSEIQSILKVILTHSDYGFLIAEDNGKLLAFVGYHKLYFFEKSGTYYRILALVVNEKHRRKGIASQLINHVKQLAKTDGSEVLALNSSLKEYRQEAYHFYENLGFKKVSTGFSYYLD

SEQ ID NO: 9821 - DNA, 2118 bp, Streptococcus agalactiae
atggcaactacgacaaaaacgtcgaccaaaaaaacaagtaaaaaaaaatcagctactgctaaaaaaaatctagttattgtggagtctcctgcaaaagcaaagactatcgaaaaatacttaggacgtaactataaagttgtagcctcagtaggtcatatccgtgatttaaaaaagtcaagtatgtccattgattttgagaataattacgaaccacaatatattaatattcgtggtaaaggacctctcattaatgatttaaaaaaagaagctaaaaaggctaaaaaagtttacctcgcgagtgacccggaccgtgaaggagaagctatttcctggcatttagcgcatattttagatttagacaaagaagacagaaaccgtgttgttttcaatgaaatcacaaaagatgctgttaaaaatgcttttgtggaacctcgtcagattaacatggatctcgttgatgctcagcaagcacgacgtgttttagatcgcattgttggttattctatctcacctattttatggaaaaaagtaaaaaaaggcctatcagctggacgtgtacaatcagttgctcttaaactaatcattgatcgtgaaaatgagattaaggctttccaaccggaggagtattggactattgacggttcctttaaaaaaggaacacgtaaattcaatgccactttctacggtttagacggaaagaaattcaaattatcgaataatgaagacgtcaaaacagttctaaaacgtattaaaactgatgaattcttagttgaaaaagttgaaaaaaaagagcgtcgtcgtaatgcaccattaccgtatacaacttcttcattgcaacaagatgcagctaataaaatcaattttcgaactcgtaaaaccatgatgattgcgcaacagctgtacgaaggacttagcttaggcacagcaggtcatcaaggtctgattacctatatgcgtactgattctacacgtattagtccgttagcacaaaatgaagcaacagaatttattactaaccgttttggtgcaaattattctaaacatgggaataaagttaaaaatgcttctggagcacaagacgctcacgaagctattcgcccatctagtgttaatcatacacccgaaagtattgctaagtatttagacaaagatcaactaaaactttacactcttatctggaaccgttttattgcaagccaaatgacagcagcagtctttgacacaatgaaagttaatttaacgcaaaatggtgttacttttattgctaatggtagccaagtcaagtttgatggttacatggctgtttataacgatactgacaaaaataaaatgttaccagatatggaggaaggagaaagtgttaaaaaggttaatacgaatcctgaacaacacttcactcaacctcctgcaaggttttcagaagcaagtctcattaaaacacttgaagaaaacggtgtaggtcgtccttcaacttatgccccaacgcttgagactattcaaaaacgttattatgttaagcttgcagctaaacgcttcgaaccaactgaacttggtgaaattgttaatagccttattgtagaatttttcccagatattgttgatgttaccttcactgccgaaatggaagggaaactagacgaagttgagattggtaaagagcagtggcaaaagattatcgatgaattttataaaccatttgaaaaagaacttgcaaaagcagaaactgaaatggagaaaattcaaataaaggatgaacctgctggatttgattgcgagctatgtggatcaccaatggtaataaaactaggacgttatggaaagttttatgcgtgtagcaatttccctgaatgtcataacacaaaagctatcactaaggaaataggtgttatttgtcctatctgtcaaaaaggacaagttattgagcgaaaaacaaaacgcaatcgtatcttttatggctgtgaccgctacccagaatgtgagtttacatcttgggacaaacctattggacgaacttgccccaaatcaaatgatttcttagtggagaaaaaagtacgcggtggtggtaaacaagttgtttgctcaaatgaaaaatgcgactaccaagaagagaaaattaaa

SEQ ID NO: 9822 - protein, 706 aa, Streptococcus agalactiae
MATTTKTSTKKTSKKKSATAKKNLVIVESPAKAKTIEKYLGRNYKVVASVGHIRDLKKSSMSIDFENNYEPQYINIRGKGPLINDLKKEAKKAKKVYLASDPDREGEAISWHLAHILDLDKEDRNRVVFNEITKDAVKNAFVEPRQINMDLVDAQQARRVLDRIVGYSISPILWKKVKKGLSAGRVQSVALKLIIDRENEIKAFQPEEYWTIDGSFKKGTRKFNATFYGLDGKKFKLSNNEDVKTVLKRIKTDEFLVEKVEKKERRRNAPLPYTTSSLQQDAANKINFRTRKTMMIAQQLYEGLSLGTAGHQGLITYMRTDSTRISPLAQNEATEFITNRFGANYSKHGNKVKNASGAQDAHEAIRPSSVNHTPESIAKYLDKDQLKLYTLIWNRFIASQMTAAVFDTMKVNLTQNGVTFIANGSQVKFDGYMAVYNDTDKNKMLPDMEEGESVKKVNTNPEQHFTQPPARFSEASLIKTLEENGVGRPSTYAPTLETIQKRYYVKLAAKRFEPTELGEIVNSLIVEFFPDIVDVTFTAEMEGKLDEVEIGKEQWQKIIDEFYKPFEKELAKAETEMEKIQIKDEPAGFDCELCGSPMVIKLGRYGKFYACSNFPECHNTKAITKEIGVICPICQKGQVIERKTKRNRIFYGCDRYPECEFTSWDKPIGRTCPKSNDFLVEKKVRGGGKQVVCSNEKCDYQEEKIK

SEQ ID NO: 9823 - DNA, 759 bp, Streptococcus agalactiae
atggcaacaattaaagaaatcaaagcaattttagagactattgttgatttaaaagacaaacgttggcaagaatatcaaacagattcacgcgcaggtgttcaaaaagcaatccttcaacgaaaaaaaaatattcagtcagatttagacgaagaagcgcgcttagaacaaatgttggtctacgaaaaaaaactttacattgaacatataaaccttattgcaggaatcgatgaagtaggtagaggtcctttagcgggaccagtagtagctgctgctgttattcttccaccaaactgtaaaataaaacatctcaatgactccaaaaaaattccaaagaaaaagcatcaagaaatctatcaaaatattttagatcaagcgttagcagttggtattggtattcaagacagccaatgtattgatgatatcaacatttatgaagctacaaaacatgctatgattgatgcagtttctcatttatctgtggctcctgaacatcttttaattgatgctatggttttagatctatcaattccacaaactaaaattatcaaaggtgatgctaattcactctctattgcagcagcttcaatcgtagctaaagtgaccagagataaaataatgtctgattatgatagcacatatcctggatatgcattttctaaaaatgctggctatggtactaaagagcatttagaaggtttgcaaaaatacggtattactccgatacatcgtaaaagttttgaacctataaaatcaatgttg

SEQ ID NO: 9824 - protein, 253 aa, Streptococcus agalactiae
MATIKEIKAILETIVDLKDKRWQEYQTDSRAGVQKAILQRKKNIQSDLDEEARLEQMLVYEKKLYIEHINLIAGIDEVGRGPLAGPVVAAAVILPPNCKIKHLNDSKKIPKKKHQEIYQNILDQALAVGIGIQDSQCIDDINIYEATKHAMIDAVSHLSVAPEHLLIDAMVLDLSIPQTKIIKGDANSLSIAAASIVAKVTRDKIMSDYDSTYPGYAFSKNAGYGTKEHLEGLQKYGITPIHRKSFEPIKSML

SEQ ID NO: 9825 - DNA, 522 bp, Streptococcus agalactiae
atgagtatctttagcgtatattctatttttcgtggtgataaagccaaagaaaaagcaagtgtcataaaacaagcatctcaaacaagtcaaacttcaaaaaaagaggtcttacaaaagaagacttatccaaatctaaataaatattcaaatctagaaattcatgtttcatctacgaggcaaacaatgacaataacctcgaatgacaaggtcatctttaaaacgattgtttcaacaggagcaaaagagagccctaccccaaaaggaacttttgtcatagaaccggaacgaggagattttttctataacgcctcatcaaaagaaggagcctattattgggtctcctttaaagaacatggtatttatctctttcatagcgttccgactgatcaacaaggaaatgagattccagaagaagcaaagcaattaggaaaagccgcctcacatggctgtgtgcgtatgtcaagggcggatgcaaaatggttctatgaaaatattcctcaaggaacgactgttaccatcaaa

SEQ ID NO: 9826 - protein, 174 aa, Streptococcus agalactiae
MSIFSVYSIFRGDKAKEKASVIKQASQTSQTSKKEVLQKKTYPNLNKYSNLEIHVSSTRQTMTITSNDKVIFKTIVSTGAKESPTPKGTFVIEPERGDFFYNASSKEGAYYWVSFKEHGIYLFHSVPTDQQGNEIPEEAKQLGKAASHGCVRMSRADAKWFYENIPQGTTVTIK

SEQ ID NO: 9827 - DNA, 120 bp, Streptococcus agalactiae
atgtttaaaggatttaaaaaattgattattattatgggagggataagcttaatgatgattttaacagcatgtgacttagtaaaaaaaatcaccaatgggttcaagaacattgaaaatact

SEQ ID NO: 9828 - protein, 40 aa, Streptococcus agalactiae
MFKGFKKLIIIMGGISLMMILTACDLVKKITNGFKNIENT

SEQ ID NO: 9829 - DNA, 699 bp, Streptococcus agalactiae
atgttagaaaaatgccctatcattgccttagatttttctgatttggcttctgtaacaacttttttagaacattttccaaaagaagaattgctttttgtcaaaataggaatggagctttattattccgaaggtccctcaattattagatatattaaatccttaggacatcgcatttttttggatttaaaattacatgatatccctaatacagttcgatcatctatgtctgtcttagccaaattaggcattgatatgactaatgtgcatgctgcaggaggagtcgaaatgatgaaagcagctagagaaggtttggggaagggtccaatactattagcagtgacacaattaacctcgacttcacaagaacaaatgcaggtggatcaacatattaacttaagtgtagttgattcggtttgccattatgctcaaaaagctcaagaagcaggcttagatggagtagtcgcatcggctcaagagggaatgcaaatcaagaaacagactaacgaacatttcatttgcttaacgcctggtatcagacctccacaaaccaatcagttagatgatcaaaaaagaacgatgactcctgagcaagcacgtatagttggggctgattatatcgttgtgggaagacctataacgaaagcagaaaatccatatcaagcatatctagagataaaagaagaatggaatcgtattaaa

SEQ ID NO: 9830 - protein, 233 aa, Streptococcus agalactiae
MLEKCPIIALDFSDLASVTTFLEHFPKEELLFVKIGMELYYSEGPSIIRYIKSLGHRIFLDLKLHDIPNTVRSSMSVLAKLGIDMTNVHAAGGVEMMKAAREGLGKGPILLAVTQLTSTSQEQMQVDQHINLSVVDSVCHYAQKAQEAGLDGVVASAQEGMQIKKQTNEHFICLTPGIRPPQTNQLDDQKRTMTPEQARIVGADYIVVGRPITKAENPYQAYLEIKEEWNRIK

SEQ ID NO: 9831 - DNA, 1023 bp, Streptococcus agalactiae
atgattcgtcaattagaacaatcgaatttaccaatagaacaagtgaaacttttatcatcaagtcgctcagcaggtaaaattttacattttaaagatgaggctatacgtgttgaagagacaacaaaagaatcattttacgatgttgatattgccttgttttcagctggtggatctatttcagcaaagttcgctccttatgcagtaaagtctggagcagttgtagtagataacacgtcatattttcgtcagaatcctgatgttccactagttgttcctgaagtaaatgctcatgccatgattggtcataatggtatcatagcttgccccaattgttctactattcaaatgatgattgctttagagcccattcgtcaaaaatgggggatagagcgtgttatagtttccacctatcaagctgtttcgggttcaggtgcacgtgctgttgaagaaactaaggaacagttgagacaagttttaaatgataacctttcacctgatcaattaattgcaacagtcttgccatgttctagcgatcaaaaacattatcctatcgcattcaatgcattacctcaaattgatatttttactgataatgattatacgtacgaagaaatgaaaatgactttggagacaaagaaaattatggaagatgctactattaaggtttcagctacctgcgtccgtattcccgttttatcggggcattctgagtccatttatattgagacgaaagaattagcctcaatctctgaaattaaaaaggctattgcaaattttcctggtgccgtcctacaagaccttccatctcagcaaatttaccctcaagcgattaatgctgtaggccatagggagacctttgttggtcgtattcgaaaagaccttgatcaagaaaatggtgttcatatgtgggtagtttcagataatctactgaagggggcagcttggaattctgttcaaattgcagaaacattgcataagaatgggctggttaaaccagcaaaagagttaaaatttgaattaata

SEQ ID NO: 9832 - protein, 341 aa, Streptococcus agalactiae
MIRQLEQSNLPIEQVKLLSSSRSAGKILHFKDEAIRVEETTKESFYDVDIALFSAGGSISAKFAPYAVKSGAVVVDNTSYFRQNPDVPLVVPEVNAHAMIGHNGIIACPNCSTIQMMIALEPIRQKWGIERVIVSTYQAVSGSGARAVEETKEQLRQVLNDNLSPDQLIATVLPCSSDQKHYPIAFNALPQIDIFTDNDYTYEEMKMTLETKKIMEDATIKVSATCVRIPVLSGHSESIYIETKELASISEIKKAIANFPGAVLQDLPSQQIYPQAINAVGHRETFVGRIRKDLDQENGVHMWVVSDNLLKGAAWNSVQIAETLHKNGLVKPAKELKFELI

SEQ ID NO: 9833 - DNA, 834 bp, Streptococcus agalactiae
ttggaatggcaagatctagcgcagttacctgtatctatttttaaagactatgttacagatgctcaagacgcggaaaaaccttttatatggacagaagtatttttaagggagattaatcgctcaaatcaagaaattattttgcatatttggccgatgactaagacagtcattctggggatgttagatcgagaattaccacatttagaattagctaaaaaagaaatcatcagtcgtggctatgaaccagttgttcggaattttggtggtctcgcagttgtagctgatgaaggaattttaaatttttcattggttattccagatgtttttgagagaaaattgtctatctcagatgggtatcttataatggtcgattttattagaagtatattttcagatttttatcaacctattgagcactttgaagtagagacctcctattgtcctggtaagtttgatcttagtataaatggcaaaaaatttgctggcttggctcagcgccgtataaagaatggtattgcggtatcaatttaccttagcgtttgtggcgatcaaaaagggcggagtcaaatgatttcagatttttataagattggtctaggtgatacgggtagtccaattgcttatccaaatgtagatcctgaaattatggctaatctatctgatctattagattgtcctatgacagtagaagatgttattgatcgtatgttgattagccttaaacaagtaggttttaatgatcgtttactgatgattagacccgatttagttgcagagtttaatagatttcaggctaagtctatggctaataaggggatggtgagcagagatgaa

SEQ ID NO: 9834 - protein, 278 aa, Streptococcus agalactiae
MEWQDLAQLPVSIFKDYVTDAQDAEKPFIWTEVFLREINRSNQEIILHIWPMTKTVILGMLDRELPHLELAKKEIISRGYEPVVRNFGGLAVVADEGILNFSLVIPDVFERKLSISDGYLIMVDFIRSIFSDFYQPIEHFEVETSYCPGKFDLSINGKKFAGLAQRRIKNGIAVSIYLSVCGDQKGRSQMISDFYKIGLGDTGSPIAYPNVDPEIMANLSDLLDCPMTVEDVIDRMLISLKQVGFNDRLLMIRPDLVAEFNRFQAKSMANKGMVSRDE

SEQ ID NO: 9835 - DNA, 690 bp, Streptococcus agalactiae
atggctatgaaaattttgattacatcaggtggaactaccgagaaaattgataccgttaggagtatcacgaatcacgcaacaggaactttaggaaaaataattgcagaaaaatatttacgagaaggacatcaggtgacactcgtgactactaaaaatgcagtcaaaccagaatctgctaccaacttatccacatttgagattgaggacgttgactcattaataaaaaccttgaagccattagtgaaagagcatgatattttaattcatagcatggcagtgtctgactatacccccgtctacatggctgatttcgaaaaggttaaatcaagcgatcatttagatacttttttgcgcaaagataaccacgaagggaaaatatcatctgaatcagaatatcaagtcctttttctcaaaaaaacaccaaaagttatcagccttgtgaaaaaatggaatcctcaaattactctagtaggttttaaactacttgtgaacgttactaaagaaaatctttttaaagttgctcgtcatagcttaatcaaaaataaagctacgtttattttagctaatgacctcattgatattacctcaaaacatcacatagcctacctacttgaccatgataatgtgtataaagctaccaccaaagaagatattgctcaattaatttacgaaaaggtaaaaaaatatgat

SEQ ID NO: 9836 - protein, 230 aa, Streptococcus agalactiae
MAMKILITSGGTTEKIDTVRSITNHATGTLGKIIAEKYLREGHQVTLVTTKNAVKPESATNLSTFEIEDVDSLIKTLKPLVKEHDILIHSMAVSDYTPVYMADFEKVKSSDHLDTFLRKDNHEGKISSESEYQVLFLKKTPKVISLVKKWNPQITLVGFKLLVNVTKENLFKVARHSLIKNKATFILANDLIDITSKHHIAYLLDHDNVYKATTKEDIAQLIYEKVKKYD

SEQ ID NO: 9837 - DNA, 975 bp, Streptococcus agalactiae
atgatggatttttatatcaaacagattattatacatcagttttctcctaacgacacagagttagtgctatcagatactccgctaaccctaactccaaggattgatgactactttcgtaaaaaattaagtaaagttttttctgatgaagctaagcgtggctattttggagaggataatgtatttatgagtcatttacaagatgatttatatgtttcttcctgtcaaattgcgcaactttggaaagaagagtttgtcatatcggaagatcaaaaaacgaatgacttagtttttattcaatttgacaaggatggaatggaacattttgctttccttcgaatctcattaaaggaacaatttgctcatgtttctgaaaatcaagagcagccaattacaataacacagaataaccttccaagtgctgctcaaactccagatgaagctttggttgttaacaagtcatcaaagcaatactatttaattgaaaagcgtatcaaacacaatggttcatttgctaattatttttctgaaaatttattacaagtacaaccagaacagtctgttaaaaaatctataaaaatggttgaacagacagctcaaaaaattgctgaaaatttcaacaaagatgatttttctttccaatcaaaaatgaaatcggctatttataagaatttagaagaagagcaagaattgtctccagaaaaattagcagatcaattatttgatgataatttaacagccaggctgacttttgttgatgaattgaaagacgcaatacctggacctgttcaagtaagtgatattgatcattcccgtcaaattaagaagttagagaatcagaagctatctctttcaaatggtattgaattgattgtacccaacaatgtctaccaagatgccgaatcagttgaatttatccaaaaccctgatggtacatactcaatactaatcaaaaacatacaggatattcaaaataaa

SEQ ID NO: 9838 - protein, 325 aa, Streptococcus agalactiae
MMDFYIKQIIIHQFSPNDTELVLSDTPLTLTPRIDDYFRKKLSKVFSDEAKRGYFGEDNVFMSHLQDDLYVSSCQIAQLWKEEFVISEDQKTNDLVFIQFDKDGMEHFAFLRISLKEQFAHVSENQEQPITITQNNLPSAAQTPDEALVVNKSSKQYYLIEKRIKHNGSFANYFSENLLQVQPEQSVKKSIKMVEQTAQKIAENFNKDDFSFQSKMKSAIYKNLEEEQELSPEKLADQLFDDNLTARLTFVDELKDAIPGPVQVSDIDHSRQIKKLENQKLSLSNGIELIVPNNVYQDAESVEFIQNPDGTYSILIKNIQDIQNK

SEQ ID NO: 9839 - DNA, 549 bp, Streptococcus agalactiae
atgccaacagaaacagtctacggaatttttgccaaagctttgagtgaagaagctgtgaaccacgtctatgagcttaaaaaaaggcctcgtgataaggctatgaacttaaatatatgtgattttgagactattttaaaatattctaaaaatcaaccgacctatttaaagcaattgtacgatgcttttttaccaggaccgctaaccattattttggaagcttcacaagaagttccgcattggatcaattctgggttattaagcgtaggatttcggatgcctaaacaccctgtaacccttgatatgattgctaaccatggtccactgattggtccttctgctaatatttctggatgtgatagtggtcgtgtgttctcagaaattcaaaaacagtttaatcatcaagttttaggtattgaagatgataaagcattgacaggtgtggattctactattattgatttgtctggtgatagagttaagattttaaggcaaggtgcaatcacgcaagaggtactaacggctacgatacctgaattaatttttgaaaat

SEQ ID NO: 9840 - protein, 183 aa, Streptococcus agalactiae
MPTETVYGIFAKALSEEAVNHVYELKKRPRDKAMNLNICDFETILKYSKNQPTYLKQLYDAFLPGPLTIILEASQEVPHWINSGLLSVGFRMPKHPVTLDMIANHGPLIGPSANISGCDSGRVFSEIQKQFNHQVLGIEDDKALTGVDSTIIDLSGDRVKILRQGAITQEVLTATIPELIFEN

SEQ ID NO: 9841 - DNA, 471 bp, Streptococcus agalactiae
gtggttattatgacaagcgccttggacactcgagatgaatttggagtcgtttcaagtcgtattggaatgcgtcgtgaagcagttccaatttcagatgatatggacattttctcctatattcagaatttaccacaaaagccttattgtgttttaattgatgaatgtcaatttttgagtaagaaaaacgtctacgatttagctagagtagtagatgacttagatgtaccagtcatggcttttggtttgaaaaatgatttccaaaacaatctttttgaaggttcaaaacatttgctattattggccgataagattgatgaaatcaaaacaatttgccaatactgtagtaagaaagcaaccatggttttaaggacagaaaacggaaaacctgtctatgaaggtgatcagatacaaattggtggtaatgaaacatatatcccagtttgtcgaaaacattattttaatccagatatt

SEQ ID NO: 9842 - protein, 157 aa, Streptococcus agalactiae
MVIMTSALDTRDEFGVVSSRIGMRREAVPISDDMDIFSYIQNLPQKPYCVLIDECQFLSKKNVYDLARVVDDLDVPVMAFGLKNDFQNNLFEGSKHLLLLADKIDEIKTICQYCSKKATMVLRTENGKPVYEGDQIQIGGNETYIPVCRKHYFNPDI

SEQ ID NO: 9843 - DNA, 936 bp, Streptococcus agalactiae
ttgcaactttctcatagtttaagactcatgggaacgactatcgatattcaaattaattctaaaaatgctcaaaaacaaatccgagaggtcatagaactcttggagctctacaaaaatcgctttagtgcaaatgactttaattcagagttaatggctataaataacaacgctggtatcaagcctattcaagtacatccagacctctttgaattaatcacaattgggaaagaacacagcttagctaggcctagtaacctaaatattgctattggtcctttagtgcaaacttggagaattggattttcagatgctaaactacctagccctagtgaaatatcagaagctatgattttatctgacccaactcatatacttctagattcaaataaacaatctgtttttttaaatcagataggaatgaaaattgatttgggtgcacttgcaaaaggatatatcgctgacaaaattatgacctatctcaaaaatgagatgattgattctgctattattaatttaggcggaaacgttttagttcacggagataatcctaatcgttcagaagggtattgggttatcggcattcaacatccgaaaaagaaacggggaaaaaatattggaactgtcaaaattaaaaaccaatctgttgtaacctcaggtacttatgaacgccgtctgattattgacgataaggaataccatcatatttttgatcgacagactggttatccgatacaaacagagatggctagcatttctattgtttctaaacaatccgtcgactgtgaaatctggaccacaaggttgttcggcttatccattaaagaggctcttgatattttaaacgctgtttcctacattgaaggcattatcatcactaaagatgatcgtatctatttatctgatggcttaaaacatcattttcaactattttatcat

SEQ ID NO: 9844 - protein, 312 aa, Streptococcus agalactiae
MQLSHSLRLMGTTIDIQINSKNAQKQIREVIELLELYKNRFSANDFNSELMAINNNAGIKPIQVHPDLFELITIGKEHSLARPSNLNIAIGPLVQTWRIGFSDAKLPSPSEISEAMILSDPTHILLDSNKQSVFLNQIGMKIDLGALAKGYIADKIMTYLKNEMIDSAIINLGGNVLVHGDNPNRSEGYWVIGIQHPKKKRGKNIGTVKIKNQSVVTSGTYERRLIIDDKEYHHIFDRQTGYPIQTEMASISIVSKQSVDCEIWTTRLFGLSIKEALDILNAVSYIEGIIITKDDRIYLSDGLKHHFQLFYH

SEQ ID NO: 9845 - DNA, 663 bp, Streptococcus agalactiae
atgcttttgtcagccttccacatgtacgaaaaacaactggataaagtaaggtttgtcggtgttcatacaggacatttagggttttatacagactatcgagattttgaagttgacacattaattaataatttgaaaaatgataaaggtgaacaaatctcctatcccattttgaaagtaactattacccttgaagatggtcgagttattcgtgcgcgtgctttaaatgagtctactattaagcgtattgaaaaaacaatggtagcggatgttgttattaatcaagtggtatttgaaaggtttaggggagatggcattttagtttctacaccaaccggtagtactgcttacaataaatcactagggggggcagtactccacccaacgatagaagccttgcaactaacagaaatttctagtcttaataatcgcgtctatcgtaccttggggtcatcggttatcatccccaaaaaagatgctatagagatagttcctaaacgagttggtgtctatacaatttctatagataacaaaacagtccattacaagaatgttaccaaaatagaatatagtattgacgaaaaaagtattaactttgtttcaactccaagtcacactagtttttgggaacgtgttaacgatgcttttatcggagaacctgaacat

SEQ ID NO: 9846 - protein, 221 aa, Streptococcus agalactiae
MLLSAFHMYEKQLDKVRFVGVHTGHLGFYTDYRDFEVDTLINNLKNDKGEQISYPILKVTITLEDGRVIRARALNESTIKRIEKTMVADVVINQVVFERFRGDGILVSTPTGSTAYNKSLGGAVLHPTIEALQLTEISSLNNRVYRTLGSSVIIPKKDAIEIVPKRVGVYTISIDNKTVHYKNVTKIEYSIDEKSINFVSTPSHTSFWERVNDAFIGEPEH

SEQ ID NO: 9847 - DNA, 678 bp, Streptococcus agalactiae
atgtaccatattgaattaaaaaaggaagctttattaccaagagaacgcctagttgatttaggcgcagatagattgagtaatcaggagttattagccattctcttacgtacaggtattaaagaaaaacctgttctggaaatttcaacgcaaattttagaaaacataagcagtttagcagattttggtcaattatccttacaggagttgcaatccattaaaggaatcggtcaggttaaatccgtcgaaataaaagctatgctagaactagcaaaacggattcacaaagctgaatatgatcgtaaagagcaaattttaagtagtgaacaattagcgaggaaaatgatgctcgaattaggggataaaaaacaagaacatttagtagctatttatatggatacacaaaatcgtattatcgaacagagaactatttttattggtactgtacgtcgttcagtagcagagccaagagaaattctacattatgcttgtaaaaacatggcaacttctttgattatcatacataatcatccctcaggttctccaaagcccagtgaaagtgatttaagtttcactaaaaaaataaaacgatcatgtgatcatctgggaattgtctgcctagatcacatcatcgttggaaaaaataaatattatagttttcgagaagaagcagatatttta

SEQ ID NO: 9848 - protein, 226 aa, Streptococcus agalactiae
MYHIELKKEALLPRERLVDLGADRLSNQELLAILLRTGIKEKPVLEISTQILENISSLADFGQLSLQELQSIKGIGQVKSVEIKAMLELAKRIHKAEYDRKEQILSSEQLARKMMLELGDKKQEHLVAIYMDTQNRIIEQRTIFIGTVRRSVAEPREILHYACKNMATSLIIIHNHPSGSPKPSESDLSFTKKIKRSCDHLGIVCLDHIIVGKNKYYSFREEADIL

SEQ ID NO: 9849 - DNA, 1434 bp, Streptococcus agalactiae
atggtaaaacaagtatttccaaaaggttttttatggggcggggcaactgctgccaatcaatgcgaaggagcttacaatgttgatggacgtggcctagcaaatgtagatgttgttcctactggagaagatcgatttgcaattatttcaggacaaaagaaaatgtttgattttgaggaaggatacttttatccagcaaaagaatcaatagatttttatcaccattataaagaggaccttgcattacttgcagaaatgggtttcaaaacctatcgtatgtcaatagcatggacgcgtatttttccaaagggtgatgagctatatccaaatgaagctggtcttcagttttatgaaaatatttttaaagagtgtcgtaagtatggtattgaacctttggtaaccattacacattttgactgtcctatctaccttattaaacattacggtgggtggcggagccgtaaaatgattggtttttatgagcgccttgtacgagctttatttactcgttttaaggggttagttaaatattggttgacctttaacgaaatcaatatgattttacacgctccttttatgggcgctggcttatattttgaagatggtgaaaatcaagagcaaattaaatatcaagcagctcaccatgagttagtggcttcggctattgcagtaaaaattgctcatgaagttgatccaaataatcaaatcggatgtatgctagctgcaggtcaatactatccaaatacgtgtcatccacaagattattgggcttcgatgcaaaaaaatagagaaaattatttttttattgatgtgcaagctcgtggcaaataccctaattatgctaaaaaacattttgagcatttaggtatttcaattcaaatgacagcagaagatcttgctttgttaagagactatacggttgattttatttcattttcttactattcaagccgagtagcttcaggtaatccaactgtcagtgaacaggttcaagaaaatattttcgcatctcttaagaatccttacttgaaatcttctgaatggggatggcaaattgatccgcttggattacgtattaccttaaatgctatctgggatcgttatcaaaaaccgatgtttattgttgaaaatggacttggagcagtagatattcctgatgagaatggttacgtagaagatgattatcgtattgattacctccgtcagcacattgctgcaatgagagatgctatatatgtagatggtgttaatctaattggctatactacatggggatgtattgatttagtatctgcaggaactggtgaaatggaaaaacgctatggtttcatttatgttgatcgcaataataaaggagaggggacactcaagcgttacaagaaaaaatcgttttattggtacaagaaggttattgcaagtaatggcagtcaaatagaa

SEQ ID NO: 9850 - protein, 478 aa, Streptococcus agalactiae
MVKQVFPKGFLWGGATAANQCEGAYNVDGRGLANVDVVPTGEDRFAIISGQKKMFDFEEGYFYPAKESIDFYHHYKEDLALLAEMGFKTYRMSIAWTRIFPKGDELYPNEAGLQFYENIFKECRKYGIEPLVTITHFDCPIYLIKHYGGWRSRKMIGFYERLVRALFTRFKGLVKYWLTFNEINMILHAPFMGAGLYFEDGENQEQIKYQAAHHELVASAIAVKIAHEVDPNNQIGCMLAAGQYYPNTCHPQDYWASMQKNRENYFFIDVQARGKYPNYAKKHFEHLGISIQMTAEDLALLRDYTVDFISFSYYSSRVASGNPTVSEQVQENIFASLKNPYLKSSEWGWQIDPLGLRITLNAIWDRYQKPMFIVENGLGAVDIPDENGYVEDDYRIDYLRQHIAAMRDAIYVDGVNLIGYTTWGCIDLVSAGTGEMEKRYGFIYVDRNNKGEGTLKRYKKKSFYWYKKVIASNGSQIE

SEQ ID NO: 9851 - DNA, 795 bp, Streptococcus agalactiae
atggatggaacttttctacgctcagataaaacttatgataaagcacggttttcttctttattaacgttgatggagaagtatgatattaaatttgtagctgctagtggtaatttatacgatcaattgttgttaaactttttggaataccctaatcgtatcgcctacgtcgctgaaaatggtggtcgtgtcattgaccaagatggcacattactaaaagaaacttatttatctaatgatacagttgcagctgttttatcctatttatatcagaactatcctgagacactcatcagcttatctggtgaaaaacgttcataccttgagcgaagaactcctattaataggcggactgaattagaatactatatgcctaattttatctataaagaccatttgctgcccttagatgatgaccgctattttcaaatgacactttgggtaaatgaaaatcttgtttctgagatgttgttagatattagtgaacactttaaaaatcatcatatcagattgacctctagtggttttggttgtatcgatgtcttaccagctgatgtcaataaagcggatggtatcgctattctccttgaaaagtggggattgaaacaggatcaagtgatggtttttggtgatgggggcaatgatgtggaaatgttgagagcagcaaatatttcttacgctatgtcaaatgcgccagaagaaattaaagctattgctaaatatcaaacagttagtaacgatcaagatggtgtgttagaaacgatagagaactttcttcacaagatgagtgataatgaa

SEQ ID NO: 9852 - protein, 265 aa, Streptococcus agalactiae
MDGTFLRSDKTYDKARFSSLLTLMEKYDIKFVAASGNLYDQLLLNFLEYPNRIAYVAENGGRVIDQDGTLLKETYLSNDTVAAVLSYLYQNYPETLISLSGEKRSYLERRTPINRRTELEYYMPNFIYKDHLLPLDDDRYFQMTLWVNENLVSEMLLDISEHFKNHHIRLTSSGFGCIDVLPADVNKADGIAILLEKWGLKQDQVMVFGDGGNDVEMLRAANISYAMSNAPEEIKAIAKYQTVSNDQDGVLETIENFLHKMSDNE

SEQ ID NO: 9853 - DNA, 792 bp, Streptococcus agalactiae
atgaagaaaacctctagtctattttcaattccttatatggcttggttattcttatttgtattagcacctgttgctttgattgcttggaactcgttctttgatattaatgggcactttactttagctaattaccagacgttttttagctcaggaacctatcttaaaatgagctttaactcggtcctatatgcaggcatcgttagtttcataacgcttttgattagctatccagctgcttatttgcttacaaaattaaaacacaagcaattatggctaatgctagttattttgccaacatggattaatcttttgttaaaagcctatgcttttatggggatatttggtcaacaagggggaattaacgccttcttaacctttataggtatcggcccaaaacagattctatttacagacttttcatttctttttgtagcagcttacattgaattaccgtttatgttattacccatttttaatgccttggatgatattgatcaaaatctcatttatgcaagtgatgacttgggtgcaaatgcatggcaaacttttcagaaggttatatttcctttatctctgaatggtgtaagagcaggtgtacagtctgtctttatccctagtttgagtctctttatgcttacgcgtcttattggtggtaatcgagttatcactttagggacagccatagaacaacattttttaatcacacaaaataaaggtatgggctcaaccataggggttattttaattttagtgatggttgctattatgtggttaacaaaggagaggaaagca

SEQ ID NO: 9854 - protein, 264 aa, Streptococcus agalactiae
MKKTSSLFSIPYMAWLFLFVLAPVALIAWNSFFDINGHFTLANYQTFFSSGTYLKMSFNSVLYAGIVSFITLLISYPAAYLLTKLKHKQLWLMLVILPTWINLLLKAYAFMGIFGQQGGINAFLTFIGIGPKQILFTDFSFLFVAAYIELPFMLLPIFNALDDIDQNLIYASDDLGANAWQTFQKVIFPLSLNGVRAGVQSVFIPSLSLFMLTRLIGGNRVITLGTAIEQHFLITQNKGMGSTIGVILILVMVAIMWLTKERKA

SEQ ID NO: 9855 - DNA, 1179 bp, Streptococcus agalactiae
atgctagagcagctgggaaaccctcaaaacaacctatctgccattcatgttgttggaacgaatggtaaaggatcaacaactagttatttacaacatatttttaccaattctggttatcaagttggaacatttacatcaccatatattgttgactttagagagcgtattagcattgatggtcaaatgattccagagtctgattttatcaaacttgttgaaactgttcgtccagttgttgaacggttgcaccttgagaccaacctagaaccagctacagaatttgaagttataacagttttgatgttctattattttggcaatagctgtccggttgatatcgtcattattgaggctggaatgggcggttattatgattctaccaacatgttcaaggctttagcggttacttgtccgtcaattggattagatcatcaggaggttttaggacgaacttatgtagatatagctgagcaaaaagtaggtgttttaaaaaaaggagttccattcgtatatgctaatgatcgtcaggatgttgaagaagtctttcaaataaaagccaaggaaacccacagccagacttatcgtttacacaatgacttttatataaaagaagaggaaaattattttaactatataggtcctcaagcaaatattgatcatattcagttgcaaatgccgggacatcaccaagtttccaatgctagcatagctataactaccagtttattattaagagacaaatatccaaagttaaccctacagaccattaaagatgggcttgaaatgacaaaatgggtaggccgtacagaattaatctttccgaatgtaatgattgatggcgctcataataatgaaagtgtcgatgctctcgttcaagttataaaaaaatatcagcagaaaaacgtgcatattctatttgctgcaattaatactaaaccgatagagagtatgttagaatcattgtctagtatcgctccggtttcggttactagctttgattaccctaaatcaataaacttagacaaatatcctaaagcgtacactagagttagtgattggaagaaatggctacatgatataaatctgacatcagataaagatttctatgtgattactggctccctttattttatttctcaagttcgtcaggagctactattaatcaaaactacaacaact

SEQ ID NO: 9856 - protein, 393 aa, Streptococcus agalactiae
MLEQLGNPQNNLSAIHVVGTNGKGSTTSYLQHIFTNSGYQVGTFTSPYIVDFRERISIDGQMIPESDFIKLVETVRPVVERLHLETNLEPATEFEVITVLMFYYFGNSCPVDIVIIEAGMGGYYDSTNMFKALAVTCPSIGLDHQEVLGRTYVDIAEQKVGVLKKGVPFVYANDRQDVEEVFQIKAKETHSQTYRLHNDFYIKEEENYFNYIGPQANIDHIQLQMPGHHQVSNASIAITTSLLLRDKYPKLTLQTIKDGLEMTKWVGRTELIFPNVMIDGAHNNESVDALVQVIKKYQQKNVHILFAAINTKPIESMLESLSSIAPVSVTSFDYPKSINLDKYPKAYTRVSDWKKWLHDINLTSDKDFYVITGSLYFISQVRQELLLIKTTTT

SEQ ID NO: 9857 - DNA, 1281 bp, Streptococcus agalactiae
atgactattaaaatagctttattaggttttggaacggttgctaagggtattccatatttgctaaaagaaaatcaacataagctactttctttagaaggcgaagatattgtgattgataaagtattagtaagagataatgaaagccgccagcgtttcatcaatcagggatttacttataactttgtgacagagataaatactattcttcaagattcacaaattgatattgtagtggaattaatgggggggattgagccagctaaaacttatttgagtcaagcattaggatttggtaaacatattgtgacagccaataaagatctcattgctttacacggaaaagagttgatggatttagcagacgctagaggtctagctttattctatgagggagcagttgctggaggcattcctattttaaggaccctatcgcattcgtttgcctcagataaaatgacacgtttattaggaattctcaacggtacctccaacttcatgttaacaaaaatgtttgaagagggatggtcttatgaacaagctctaaaaaaggcacaagagttaggttatgctgaaagtgatcccacaaatgatgttgaaggtattgatactgcctacaaagccactatcttaagtcaatttggatttggtatgcctattgattttgatgatgttaattataaggggatttctagtattcgctcagaggatgttgaagtagctcaggagatgggctttgccattaagttggtagctgatcttcgtgaaactccaactggtataagtgtagacgtttctccgacactaatttctcaaaagcatcccttagctgcagttaatcatgtgatgaatgcagtattcattgaatcaatagggattggtcagtctcttttttatggaccaggtgcgggacaaaatccaacagcaacctctgttttagcggatatcatcgatattagtcgtagtattcgatcacagataaaaattaagcctatgaatacttatcattgtccgtgtaggttgtcaatgcagtctgatattttcaatgagtactatctagctatttctttgagaaatgctgaagatagtgatacacttggaaggtactttgagcaagaaaatataggtttgaaaaatgttatcgaaaaagcattgggtgataaacaacaagaaatctatgtattaacagatgaagttagccaagagaaaataactcaatttattgaggagtttcctgagagtggtgtcattcagttaatcaatgttttcaaagtaataggaggg

SEQ ID NO: 9858 - protein, 427 aa, Streptococcus agalactiae
MTIKIALLGFGTVAKGIPYLLKENQHKLLSLEGEDIVIDKVLVRDNESRQRFINQGFTYNFVTEINTILQDSQIDIVVELMGGIEPAKTYLSQALGFGKHIVTANKDLIALHGKELMDLADARGLALFYEGAVAGGIPILRTLSHSFASDKMTRLLGILNGTSNFMLTKMFEEGWSYEQALKKAQELGYAESDPTNDVEGIDTAYKATILSQFGFGMPIDFDDVNYKGISSIRSEDVEVAQEMGFAIKLVADLRETPTGISVDVSPTLISQKHPLAAVNHVMNAVFIESIGIGQSLFYGPGAGQNPTATSVLADIIDISRSIRSQIKIKPMNTYHCPCRLSMQSDIFNEYYLAISLRNAEDSDTLGRYFEQENIGLKNVIEKALGDKQQEIYVLTDEVSQEKITQFIEEFPESGVIQLINVFKVIGG

SEQ ID NO: 9859 - DNA, 1374 bp, Streptococcus agalactiae
atggcatataaaacaatttatccgtacactaacgaagtattgcatgaattcgataatatcagtgacagtgatctcgaacagtcattagacatagcgcatgccctctacaagacatggcgcaaagaagataatgttgaagaacgccaaaatcaattgcataaagtagcagatttattacgtaaggatcgtgataagtacgctgaagttatgactaaagatatgggaaaacttttcactgaagcacaaggagaagtggacttgtgtgcagacatagctgactattatgctgataatgggcaaaagtttttaaaacctgttccgttagaaagtccaaatggagaggcttactatttgaagcaagctgtcggtgttttacttgctgtcgagccatggaatttcccattttatcagattatgcgtgtatttgcccctaactttatagtgggtaatactatgcttttaaaacatgcttctatttgtcctgcctcagctcaagcgtttgaggatttagtccgagaagcaggagctccagaaggagcgtttaaaaatatttttgcttcgtatgatcaagtttcaaaccttatatcagatcctcgtgttgcaggtgtgtgtttaactggttctgagcgtggtggggcatcaatagcagctgaagctggtaaaaatttgaaaaaatcgtctatggaattaggtgggaacgatgcttttcttattttagatgatgctgattttgatttacttagtaaaacaatattctttgcgcgtttatataatgcaggtcaagtatgtacatcttcaaaacgtttcattgtcatggctgataagtatgacgaatttgtaaatatggtagttgagacctttaagtctgctaaatggggcgacccaatggattcggaaacaaccttggctccactgtcatctgcaggtgcaaaggatgatgttttaaaacaaattaaattggcggtagaccacggtgctgaggtagtttttggaaatgacactatagatcatccaggaaacttcgtcatgccaactgttttaacgaatatcactaaagcaaatccaatctataatcaagaaattttcggccccgtagcctctatctataaagtggatactgaagaagaagctattgctttagctaatgattctagttatggtttaggaagcactgttttttcttctgatccagaacatgctaaaaaagtggcggctcagattgaaacagggatgacatttattaattcagggtggacatcattaccggaattaccgtttggaggtattaaaaattcaggatatggtcgtgagttgagccaacttggatttgatgcctttgtcaacgaacatttggtatttacaccaaatagtgat

SEQ ID NO: 9860 - protein, 458 aa, Streptococcus agalactiae
MAYKTIYPYTNEVLHEFDNISDSDLEQSLDIAHALYKTWRKEDNVEERQNQLHKVADLLRKDRDKYAEVMTKDMGKLFTEAQGEVDLCADIADYYADNGQKFLKPVPLESPNGEAYYLKQAVGVLLAVEPWNFPFYQIMRVFAPNFIVGNTMLLKHASICPASAQAFEDLVREAGAPEGAFKNIFASYDQVSNLISDPRVAGVCLTGSERGGASIAAEAGKNLKKSSMELGGNDAFLILDDADFDLLSKTIFFARLYNAGQVCTSSKRFIVMADKYDEFVNMVVETFKSAKWGDPMDSETTLAPLSSAGAKDDVLKQIKLAVDHGAEVVFGNDTIDHPGNFVMPTVLTNITKANPIYNQEIFGPVASIYKVDTEEEAIALANDSSYGLGSTVFSSDPEHAKKVAAQIETGMTFINSGWTSLPELPFGGIKNSGYGRELSQLGFDAFVNEHLVFTPNSD

SEQ ID NO: 9861 - DNA, 1005 bp, Streptococcus agalactiae
atgttatttaaggaaaaaattcctggattaatattatgctttattattgctataccatcttggttgcttgggctttatctccctttaataggagcaccagtttttgctatcttgattggaataattgttggatccttttatcaaaatcgacaattatttaataagggtattgcttttacatctaaatatattttacaaacagcagttgtcttattaggttttggactaaacctcatgcaagtgatgaaagttggtatatcatcgttacccatcattattatgacgatttccatttcattgattattgcttatgttttgcaaaagttatttaagttagataaaacgattgctactttaataggtgttggttcatctatttgtggtgggtccgcaattgcagcgactgcaccagttattaatgctaaagatgatgaagtagcacaagctatttcggttatttttttattcaatatcttagcggctttaatttttccaacgctggggaattttattggtctctctgatcacggttttgcattatttgcagggactgctgtcaatgatacctcgtcagttacagcaactgctactgcatgggatgctatcaatcacagcaatactttgggcggagctactattgttaaattgacacgaacattagccatcattccaattacgattgtattatctatttaccatatgaaacaaacgcagaaagaacaatctgtaagtgttactaagatatttccgaagtttgtgctttattttatcttagcttctttgctaacaacgatagttgcttcattaggtttttcgttacgtatctttgagccacttaaggttttatctaaattttttattgttatggcaatgggggcaattggtataaatactaatgttagcaaactaattaaaactggaggaaaatcaattcttttaggtgcagcgtgttggttaggcattattatagttagtttaacaatgcaagctatccttggaacttgg

SEQ ID NO: 9862 - protein, 335 aa, Streptococcus agalactiae
MLFKEKIPGLILCFIIAIPSWLLGLYLPLIGAPVFAILIGIIVGSFYQNRQLFNKGIAFTSKYILQTAVVLLGFGLNLMQVMKVGISSLPIIIMTISISLIIAYVLQKLFKLDKTIATLIGVGSSICGGSAIAATAPVINAKDDEVAQAISVIFLFNILAALIFPTLGNFIGLSDHGFALFAGTAVNDTSSVTATATAWDAINHSNTLGGATIVKLTRTLAIIPITIVLSIYHMKQTQKEQSVSVTKIFPKFVLYFILASLLTTIVASLGFSLRIFEPLKVLSKFFIVMAMGAIGINTNVSKLIKTGGKSILLGAACWLGIIIVSLTMQAILGTW

SEQ ID NO: 9863 - DNA, 2277 bp, Streptococcus agalactiae
atgaatcctttaataattggaatgaatgataaacaagcagaagcggtacaaacgacagacggaccgcttttgattatggcaggagctggctctggaaaaacacgtgttctgactcatcgtattgcttatttaatagatgaaaaatatgttaatccttggaatattttagcgattacttttactaataaagcagcgcgtgaaatgcgtgaacgtgctatcgccttgaatccagctacccaagatactttgattgcaacttttcatagtatgtgtgttcgtattttacgtcgtgaagctgattatattggatataatcgtaactttacaatcgttgatccaggtgagcagcgtactttaatgaagcgaatcattaagcaattaaatttggacacaaaaaagtggaatgaacgttcaattttaggtacaatctctaatgctaaaaatgaccttcttgatgaaattgcatatgagaagcaagccggagatatgtatacacaggtaattgctaaatgctataaagcttatcaagaggaattacgtagaagtgaggccatggatttcgatgacttgattatgatgacacttcgattatttgatcagaataaagatgttttggcctattaccaacagaggtatcaatatatccatgtagacgagtatcaagatactaaccacgctcaataccaattagttaagttattagcttcgcgtttcaaaaatatttgtgttgttggtgatgccgatcaatccatttacggatggcgtggagctgatatgcaaaatattcttgattttgaaaaggactatccgcaagccaaagttgtattattagaagaaaattatcgatcgactaagaaaatacttcaagctgctaataatgtgattaatcataataaaaatcgccgtcccaaaaaattatggactcaaaatgatgaaggtgagcaaattgtatatcatagagctaacaacgagcaagaagaagcagtttttgtagcatcaactattgataacatcgttcgagaacaaggaaaaaatttcaaagattttgccgttctttatcgtacgaatgcgcaatctcgtactattgaggaagcacttttaaaatccaatattccatatacaatggttggtggaacaaaattctatagtcgtaaagaaattcgagatgttattgcttatctcaatatccttgcaaatacttctgataatatttcttttgagcggattgtaaatgaacctaaaagaggggtggggccaggaactttagaaaaaatacggtcatttgcctatgaacagagcatgtctcttcttgatgcctcttcaaatgtcatgatgtcgcccttaaaagggaaggctgctcaagctgtttgggatttagctaatctgattttgactctacgtagtaatctagatagtttaactgtaacggagattacagaaaacctactggataagacaggatatctagaagcacttcaagttcaaaatacattagaaagtcaagcgcgtattgaaaatattgaagaattcttgtcagtgactaaaaattttgacgataacccagagattacagtagagggtgaaactggtttagatcgtctatcgcgttttttaaatgatttagctttaatagcagatactgatgatagcgccactgaaacggctgaggtcactttaatgacattacatgctgccaagggtctagaatttccagttgttttcttaatcggtatggaagaaggagtatttcctttatcgcgtgcaatagaggatgctgatgaattagaagaagagcgtcgtttagcttatgtcgggattacgagagcagaacaaatacttttccttaccaatgctaatacccgtactttatttggtaaaactagttataatagaccaacccgttttatacgtgagattgatgatgaactgatacaataccaagggttagctcgaccagttaattcttcatttggtgtgaaatattcaaaagaacagcctacacaatttggtcaaggaatgagtcttcaacaagcgcttcaggcacgtaaaagtaattcacaatctcaagtaactgcccaactccaggctcttaacgcgaacaatagccatgagacatcatgggagattggtgatgttgcaactcataaaaaatggggggacggtacggtgcttgaagtttcaggtagcggaaagactcaagagttaaaaataaattttccaggtattgggttaaagaaattattagcgagtgtcgctcctattagcaaaaaggaaaac

SEQ ID NO: 9864 - protein, 759 aa, Streptococcus agalactiae
MNPLIIGMNDKQAEAVQTTDGPLLIMAGAGSGKTRVLTHRIAYLIDEKYVNPWNILAITFTNKAAREMRERAIALNPATQDTLIATFHSMCVRILRREADYIGYNRNFTIVDPGEQRTLMKRIIKQLNLDTKKWNERSILGTISNAKNDLLDEIAYEKQAGDMYTQVIAKCYKAYQEELRRSEAMDFDDLIMMTLRLFDQNKDVLAYYQQRYQYIHVDEYQDTNHAQYQLVKLLASRFKNICVVGDADQSIYGWRGADMQNILDFEKDYPQAKVVLLEENYRSTKKILQAANNVINHNKNRRPKKLWTQNDEGEQIVYHRANNEQEEAVFVASTIDNIVREQGKNFKDFAVLYRTNAQSRTIEEALLKSNIPYTMVGGTKFYSRKEIRDVIAYLNILANTSDNISFERIVNEPKRGVGPGTLEKIRSFAYEQSMSLLDASSNVMMSPLKGKAAQAVWDLANLILTLRSNLDSLTVTEITENLLDKTGYLEALQVQNTLESQARIENIEEFLSVTKNFDDNPEITVEGETGLDRLSRFLNDLALIADTDDSATETAEVTLMTLHAAKGLEFPVVFLIGMEEGVFPLSRAIEDADELEEERRLAYVGITRAEQILFLTNANTRTLFGKTSYNRPTRFIREIDDELIQYQGLARPVNSSFGVKYSKEQPTQFGQGMSLQQALQARKSNSQSQVTAQLQALNANNSHETSWEIGDVATHKKWGDGTVLEVSGSGKTQELKINFPGIGLKKLLASVAPISKKEN

SEQ ID NO: 9865 - DNA, 1323 bp, Streptococcus agalactiae
atgactttaaatgctaaaggtgaaagtaatcaaattctagtagataaggaagtacattctactaacttattactagatatcgatgaaaaaccagaattatttcaaggtttgctgttaagttttcaacatgtttttgccatgtttggagctacgatattagttccgcttattttagggatgcctgtatcagtggctttatttgcttctggttgcggaacgctcatttatcaagttgcgacaaaatttaaagtccctgtttacctaggctcatcatttgcttatattacagctatggcattagccatgaaacaaatgcatggcgatatttcggctgctcaaacaggtattctttttgtaggtctaatctatgtcgttgtggcgacggttattaagttcgtaggaaattcatgggttgataagattttgccaccaataatcattggacctatgattattgttattggtttaggtttggcaaactctgctgtaactaatgcaggttttgtcgctaaaggtgattggcgtaaaatgctagttgctgttgttacattcttgattgcagcttttatcaatactaaagggaaaggttttatcaagattattccatttttatttgcaattattggaggttatattttatcaatcattcttggcttggtagatttatctccagttgaaaaagctgcctggtttgaattgccaaaattctatttaccgtttaagacaggtttatttcacagttataaactttactttggaccagaaatgcttgccattcttccaatctcaattgtaacgattgctgaaaatatcggtgatcatacagttttaggtcagatttgtgggcgtaactttctaaaaaaaccaggtttaaatcgtcttttaattggagatggtttagcaaccgcattttctgctcttataggaggaccagctgaaactacttatggtgaaaatacaggtgttattggcatgacgcgtatagcttctgtaacggttattcgtaatgcagcttttattgcaatcgctttttcattctttggtaaatttacagctttgatctctacaattcctagtgcagtacttggtggaatggctatattactttatggtgttattgcaagtaatggattaaaagtgttgattgaaaatcgtgtcaattttgctgaggttcgtaatctgattattgctagttccatgttagttttaggcctcggtggagcagtccttgatctaggtgctctaactttatcaggaacagcattaagtgctatagtgggtattatattaaatttaatattgccaaaagaaagcatgaaatca

SEQ ID NO: 9866 - protein, 441 aa, Streptococcus agalactiae
MTLNAKGESNQILVDKEVHSTNLLLDIDEKPELFQGLLLSFQHVFAMFGATILVPLILGMPVSVALFASGCGTLIYQVATKFKVPVYLGSSFAYITAMALAMKQMHGDISAAQTGILFVGLIYVVVATVIKFVGNSWVDKILPPIIIGPMIIVIGLGLANSAVTNAGFVAKGDWRKMLVAVVTFLIAAFINTKGKGFIKIIPFLFAIIGGYILSIILGLVDLSPVEKAAWFELPKFYLPFKTGLFHSYKLYFGPEMLAILPISIVTIAENIGDHTVLGQICGRNFLKKPGLNRLLIGDGLATAFSALIGGPAETTYGENTGVIGMTRIASVTVIRNAAFIAIAFSFFGKFTALISTIPSAVLGGMAILLYGVIASNGLKVLIENRVNFAEVRNLIIASSMLVLGLGGAVLDLGALTLSGTALSAIVGIILNLILPKESMKS

SEQ ID NO: 9867 - DNA, 1344 bp, Streptococcus agalactiae
atgctaacactttttactcatatcaatagcttcgtttggggtccacctttacttgctttattagtcggaacaggtatttacctatcatttcgcttaggttttattcaattgagacaactttctagagctttcaaattgattttccgagaggataacgggcaaggagatatttcaagttatgctgcccttgcaactgctcttgctgcaacggtagggacaggtaatatcgttggtgtggctacggctattaaatctggaggaccaggagctttgttttggatgtgggtagctgccttttttggaatggcaacaaaatacgcagaaggattattagctatcaaatatcgcacaaaagatactaatggagaaatttctggaggaccgatgtactacattatcaatggaatgggacaaaaatggaaaccattagcagtctttttttctgcagcaggtatcttagtagctcttttaggaatagggacattcactcaagtcaatgcaattgcttcttctcttgagcatactttcaaaatatcaactagatttaccagcctcattcttgctgttatagtattatttattatatttggaggtataaaatctatttcaaaagtttcagaaaaaatagtgccttttatggctataagctatattttagcaactctgattattattgcagttaattacaataagattccacatactttccaactcatctttagcggtgctttttctgggacagcagccattggtggtttttctggagctatcgttaaagaagcaattcaaaagggaattgctagaggagttttctcaaatgaatctggattgggttctgctccaatagccgcagcagcagctaaaacaaaagaacctgttgaacaaggccttatttcaatgacaggaaccttcattgacactattgttatttgtactttgacagggattgcaattttagttacaggaaaatggctagaatttgatttacagggtgctccgttaacacaagcatcttttaataccgtatttggctcactaggtagttttgccctaaccttttgccttgtcttatttgcttttactactattttaggatggagctattacggagagcgttgctttgaatatctatttgggactaaatttattaacgcttatcgcattatttttgtcattatggtcggcttaggtggtttcttacagctcgatctcatttgggttatcgctgatatcgttaatggtttaatggctttacccaatctaatagctctcctagctttgtcaccaattattgttaaagaaacacagaaatatttttcagagactaaaaatatcactaagcct

SEQ ID NO: 9868 - protein, 448 aa, Streptococcus agalactiae
MLTLFTHINSFVWGPPLLALLVGTGIYLSFRLGFIQLRQLSRAFKLIFREDNGQGDISSYAALATALAATVGTGNIVGVATAIKSGGPGALFWMWVAAFFGMATKYAEGLLAIKYRTKDTNGEISGGPMYYIINGMGQKWKPLAVFFSAAGILVALLGIGTFTQVNAIASSLEHTFKISTRFTSLILAVIVLFIIFGGIKSISKVSEKIVPFMAISYILATLIIIAVNYNKIPHTFQLIFSGAFSGTAAIGGFSGAIVKEAIQKGIARGVFSNESGLGSAPIAAAAAKTKEPVEQGLISMTGTFIDTIVICTLTGIAILVTGKWLEFDLQGAPLTQASFNTVFGSLGSFALTFCLVLFAFTTILGWSYYGERCFEYLFGTKFINAYRIIFVIMVGLGGFLQLDLIWVIADIVNGLMALPNLIALLALSPIIVKETQKYFSETKNITKP

SEQ ID NO: 9869 - DNA, 705 bp, Streptococcus agalactiae
ttggaggtaaaaatggcaactttaacgaataaccctatctttggtattatgttaaccgtatgggcgtattacattggcataaggatttttagaaaatatccttcccctgcaacaactccacttcttttggcgactattttattaattgcttttttaaaattaacacatatctcctataaagattactacaatggcggttcatttctaacgatgttaattacgccttcaacggttgtattggctattcctctctatagaacctttcatttaatgaagcatcacattaaaagcattagcattagcatcatcttagcttctgttatcaacacagtttttaccgcaatagttgctaagttttttggtatgaaatatttcttagcaatctcacttttcccaaagtccgtaactacagctatggccgttggaattacaagtaaagcaggtggattagctactatcactctggtcgtagttgttattacaggcatcttaacaagcgttttgggtcctatttttctaaaattattaaggatagaagatcctgttgctatagggctcgcgctaggaggaactgggcatgctataggaactggacaagccttaaaatatggccaagttcaaggcgccatggctggactagcaattggtatcacagggatttgctatgttattgtcagtcctttagttgcaggcttaatattgaaa

SEQ ID NO: 9870 - protein, 235 aa, Streptococcus agalactiae
MEVKMATLTNNPIFGIMLTVWAYYIGIRIFRKYPSPATTPLLLATILLIAFLKLTHISYKDYYNGGSFLTMLITPSTVVLAIPLYRTFHLMKHHIKSISISIILASVINTVFTAIVAKFFGMKYFLAISLFPKSVTTAMAVGITSKAGGLATITLVVVVITGILTSVLGPIFLKLLRIEDPVAIGLALGGTGHAIGTGQALKYGQVQGAMAGLAIGITGICYVIVSPLVAGLILK

SEQ ID NO: 9871 - DNA, 1947 bp, Streptococcus agalactiae
ttggctaaacaagatataacagtgacgaattatggcgacgatgctattcaagtcttagaaggattagatgctgttcgtaagcgtccagggatgtatatcggttccacagatggaactggtttacatcatttagtgtgggaaattgtagataatgcagttgatgaagctctatcaggttttggaaatcgcattgatgttattattaacaaagatgggagtataactgttacagaccatggacgcggtatgccaactggaatgcatgctatgggaaaacctactgttgaagtcatcttcacggtgcttcatgcaggtggaaaatttggacaaggtggttataaaacatcaggtggtctccatggtgttggatcatctgtagttaatgctttgtcttcttggttagaagttgaaatcattcgcgacggagctatttacagacaacgttttgaaaatggtggtaagcccgttacaactctgaaaaaaattggcacggcaccaaaatcaaaatctggaacttctgtcagctttatgccagatcaatcagtattttcaacgatagattttaagtttaatacaattgcagagcgcttaaaggaatctgcttttctcttaaaaaatgttactttaaccttaacagataatcgttcagaagaagcagagcatctagaatttcattatgaaaacggtgttcaagattttgtagagtatttaaatgaagataaagaaacgttgacaccaatcatgtttttcgaaggtgaagaacaagaatttcatatcgaagttgctttgcagtataatgatggtttttcagataatatcctttcttttgtcaataatgttcgtactaaagatggtggaacacatgaaactggcttgaaatcagctattacaaagtctatgaatgactatgcacgtaaaacaggacttcttaaagaaaaagataaaaaccttgaaggttctgattatcgtgaggggctatcagccattttatctattcttgtacctgaggagcacttgcaatttgaaggtcaaactaaagataaactaggaagtcccttagcacgaccaattgttgatggtattgtttctgaaaagttaacttactttcttatggaaaatggagatttagcatctaatttaatccgtaaggcaataaaagcacgtgatgcgcgtgaagctgcacgtaaagcacgtgatgaaagtaggaatgggaaaaagtcgaaaaaagataaaggtctactttctggaaaattaacccctgcacaatcaaaaaatgctaagaaaaatgaactctatttagtcgaaggagactctgcaggtggctctgctaagcaaggtcgtgatagaaagtttcaagctattttaccgttgcgaggaaaagtattgaatacagctaaggcaaagatggctgatattataaaaaacgaagaaattaatacaatgatccataccattggtgcaggtgttggtcctgattttaatcttgacgatattaattatgataaaattatcattatgaccgatgctgatactgacggagctcatattcagacactattattaactttcttttatcgctatatgagacctcttgttgaagagggacatgtctatattgctttgccacctttgtataaaatgtcaaaaggaaaaggtaagaaagaaattgttgagtatgcttggacggatatagagttagaagaattacgacaaaaatttggtaaaggctcactattacaacgatataaagggcttggggaaatgaatgccgatcaattgtgggaaaccactatgaaccctgagacaaggacattaattcgtgtaacaattgaagatttagcaagagcagaacgtcgagttaatgtcttgatgggtgataaagttcctccaagacgccaatggattgaagataatgtcaagtttactttagaagagaatacagtattt

SEQ ID NO: 9872 - protein, 649 aa, Streptococcus agalactiae
MAKQDITVTNYGDDAIQVLEGLDAVRKRPGMYIGSTDGTGLHHLVWEIVDNAVDEALSGFGNRIDVIINKDGSITVTDHGRGMPTGMHAMGKPTVEVIFTVLHAGGKFGQGGYKTSGGLHGVGSSVVNALSSWLEVEIIRDGAIYRQRFENGGKPVTTLKKIGTAPKSKSGTSVSFMPDQSVFSTIDFKFNTIAERLKESAFLLKNVTLTLTDNRSEEAEHLEFHYENGVQDFVEYLNEDKETLTPIMFFEGEEQEFHIEVALQYNDGFSDNILSFVNNVRTKDGGTHETGLKSAITKSMNDYARKTGLLKEKDKNLEGSDYREGLSAILSILVPEEHLQFEGQTKDKLGSPLARPIVDGIVSEKLTYFLMENGDLASNLIRKAIKARDAREAARKARDESRNGKKSKKDKGLLSGKLTPAQSKNAKKNELYLVEGDSAGGSAKQGRDRKFQAILPLRGKVLNTAKAKMADIIKNEEINTMIHTIGAGVGPDFNLDDINYDKIIIMTDADTDGAHIQTLLLTFFYRYMRPLVEEGHVYIALPPLYKMSKGKGKKEIVEYAWTDIELEELRQKFGKGSLLQRYKGLGEMNADQLWETTMNPETRTLIRVTIEDLARAERRVNVLMGDKVPPRRQWIEDNVKFTLEENTVF

SEQ ID NO: 9873 - DNA, 621 bp, Streptococcus agalactiae
atgattatcattgcctatctgttaggctctatccaaactggactttggattggtaaatatttttaccaagtcaatcttcgtcaacacggtagtggtaatactggcaccacgaataccttccgtattttaggtgtaaaagctggcattgtcactttgactattgacattttaaaagggactctagcaacacttattcctatcatattaggtataacgacagtatctccattttttatcggtttttttgctattataggtcacactttccctatttttgcacaattcaaaggtgggaaagccgttgctacaagcgctggggttttgctaggatttgcaccttcttttttcctttacttattagttatctttttattaacgctttatctttttagcatgatttccctatccagtattacagtagctgttgtaggtattcttagtgtcttaatttttccattagtaggctttatattaacggactacgactggatatttaccactgtggttatcttaatggccctaacgattattatccgacatcaggataatatcaaacgtattcgaaaaaggcaagaaaatttggttccgtttggcttaaacctaagtaaacaaaaaaataaa

SEQ ID NO: 9874 - protein, 207 aa, Streptococcus agalactiae
MIIIAYLLGSIQTGLWIGKYFYQVNLRQHGSGNTGTTNTFRILGVKAGIVTLTIDILKGTLATLIPIILGITTVSPFFIGFFAIIGHTFPIFAQFKGGKAVATSAGVLLGFAPSFFLYLLVIFLLTLYLFSMISLSSITVAVVGILSVLIFPLVGFILTDYDWIFTTVVILMALTIIIRHQDNIKRIRKRQENLVPFGLNLSKQKNK

SEQ ID NO: 9875 - DNA, 483 bp, Streptococcus agalactiae
atgagagaaactgaaacacacgatcaccaagcgctaattcaaaaattgttagtcagtattcattatttaaccttgtttcgtgatgaaattatattagtagaaaaaaccccatctttactggggaaacatttttctattgctattgtgcagaatgaactaggtgagatactttctaaaatagaagctttgagtaagcaaaaaaaactgattcgttctatttattggtatgatgaatcgtcatttaaagttatgaataaggctctggctattgtagaagaatggattaagggcttagataatcttttagaattctgtcaatcacagacggtttttcaagcaattttaggtgatgaacgtgcacatgtatttggaatccttattgatgtttatacttctttaaacattataaatacttctttgaaagaagaaaattctagaccagtgtccttatctgatttggctctaggtcttaaggacgaagat

SEQ ID NO: 9876 - protein, 161 aa, Streptococcus agalactiae
MRETETHDHQALIQKLLVSIHYLTLFRDEIILVEKTPSLLGKHFSIAIVQNELGEILSKIEALSKQKKLIRSIYWYDESSFKVMNKALAIVEEWIKGLDNLLEFCQSQTVFQAILGDERAHVFGILIDVYTSLNIINTSLKEENSRPVSLSDLALGLKDED

SEQ ID NO: 9877 - DNA, 591 bp, Streptococcus agalactiae
atgtttgaaacacctgaagatattatcttcaaaaacttttctatagttaaacacgaagcggaaaaaagatttgaacatcttcaaatcttatatggtggagaattgtactatacaagtgatatgttagaaaaactgaagttaaagcaaattccaactttaaacaatacgaaatttgctttaattgaattttctatgcaaacttcttggaaagatattcatacagctttgtcaaatgttttaatgcttggtattacaccagtcgttgcgcatatagagaggtataacgctttagagaatcaaaaagaacgggtgaaggaaattattaatatggggtgttacacacaaataaatagttcccatattttgaaacaaaaactttttaatgataagcataaacgctttaagaaaagagcccgttattttttagaggaaaatttagtgcattttgtagcgagtgatatgcataaccttgatgttagaccgccatttttagcagaagcttataagattatctgtagagatttcggtaaagaacgtgctaaccaactttttattgaaaatgctcaatctatattaaaaaaccattacatt

SEQ ID NO: 9878 - protein, 197 aa, Streptococcus agalactiae
MFETPEDIIFKNFSIVKHEAEKRFEHLQILYGGELYYTSDMLEKLKLKQIPTLNNTKFALIEFSMQTSWKDIHTALSNVLMLGITPVVAHIERYNALENQKERVKEIINMGCYTQINSSHILKQKLFNDKHKRFKKRARYFLEENLVHFVASDMHNLDVRPPFLAEAYKIICRDFGKERANQLFIENAQSILKNHYI

SEQ ID NO: 9879 - DNA, 870 bp, Streptococcus agalactiae
atgaatgaagccgctaaacaactctacattacccaaccttcactttcaaacgctgttaggaaccttgagactgagatgggtatccaaatttttattcgaaatccaaaaggaataacgttaacaaaagatggtatggaatttctgtcatatgcgcgacaaattctagaacaaacagcacttcttgaagagcgttataagggtgataatacaagtcgtgagctgttcagcgtttcttcacaacactatgcatttgtggttaacgcttttgtagctctctttaatggcacagacatgacccaatacgaactttttttacgtgaaactaggacttgggaaattattgatgatgttaaaaatttccgttcagagattggtgttctgtttcttaatagctataatagagatgtattaaccaaattattcgacgataattccttaattgccacaactctttttactactacacctcatattttcgtgagcaaatccaatcccttagctaatagaaaaaaattaaatatgaaagatttagaagattatccttatctgagttatgatcaaggcctgcataattctttctacttttctgaggaaatgatgtctcaaattcctcacccaaaatccattgttgtcagtgatagagcaactctgtttaatttaatgattggattagatggttatacagtggcaactggtatcctcaactcaaaattgaacggtgacgaaattgtcgcaatccctcttgacgtggatgatgttattgatattgtctatatccgacacgacaaagcaaacctttcaaaaatgggacaaaaatttattgactatttattagaggaagtttcgtttaatcataaaaataaacagtcc

SEQ ID NO: 9880 - protein, 290 aa, Streptococcus agalactiae
MNEAAKQLYITQPSLSNAVRNLETEMGIQIFIRNPKGITLTKDGMEFLSYARQILEQTALLEERYKGDNTSRELFSVSSQHYAFVVNAFVALFNGTDMTQYELFLRETRTWEIIDDVKNFRSEIGVLFLNSYNRDVLTKLFDDNSLIATTLFTTTPHIFVSKSNPLANRKKLNMKDLEDYPYLSYDQGLHNSFYFSEEMMSQIPHPKSIVVSDRATLFNLMIGLDGYTVATGILNSKLNGDEIVAIPLDVDDVIDIVYIRHDKANLSKMGQKFIDYLLEEVSFNHKNKQS

SEQ ID NO: 9881 - DNA, 765 bp, Streptococcus agalactiae
atgacagatttttcaactgctcttaaagtattagtggatcagtattcttatcataatgctttcttattattacaaaaacatggtcctttaaactcagatttattatttttattggaaatgatgaaagagcgtcgagagttaaacattgattttctttttgctcatcaagaacaagttgttatattacaagaaaaatacaatataaagcttttgcataacccgtatgatttagagttgctggcaaattacatcatggatttagaagcaaaagtaaaaaacggattaatcatagattttgtccgtagtgttagtcctattttatatcgtctatttatgattttacttgcacaagaagtacctcacttgcatgattacatccataatgcaagagatgatcactacgatacttggaagtttaaagaattaaaggagtcaaaccacccagtccttttggcattctctgaaaggtggcacgatagtcgcttgacttctaaaagcctggcagaatgtttacaattaaccgaccttgatgaagaagtgaaatcgaccatcattcaattaagacagttcgaaaaatcagtcagaaatcctttggctcacctgattaaaccttttgatgagcaagaactatatcgtacaactcaattttcttctcaagcatttttagaccagattatcttcttggcaaaggtaattggtgttgagtatgatactgttaattttcactacgatacggttaacaagcttattataaatatacttgag

SEQ ID NO: 9882 - protein, 255 aa, Streptococcus agalactiae
MTDFSTALKVLVDQYSYHNAFLLLQKHGPLNSDLLFLLEMMKERRELNIDFLFAHQEQVVILQEKYNIKLLHNPYDLELLANYIMDLEAKVKNGLIIDFVRSVSPILYRLFMILLAQEVPHLHDYIHNARDDHYDTWKFKELKESNHPVLLAFSERWHDSRLTSKSLAECLQLTDLDEEVKSTIIQLRQFEKSVRNPLAHLIKPFDEQELYRTTQFSSQAFLDQIIFLAKVIGVEYDTVNFHYDTVNKLIINILE

SEQ ID NO: 9883 - DNA, 1170 bp, Streptococcus agalactiae
atgcactatgtattaatgtttacagagtggttagcatttggtgatagtagagaaaatactctgtctttgttaaatagtgtcacaccaattaaaagagtgttatcacttactttagtctcctttttagcatcccttagttggtattacttacaaatcaaaccaaagcaaataactagtattaaacaacaggttgtttttaaggatttttctgtaaaaaaatcaccttactggctacatataggtcacgcatttttgcaattgatttatgtaggaactggtggccctattggaaaagaaggagcgccacgagagtttggagccataaatgctgggaaaatatcggatttattagcacttaaagtgctggataaacgtttattaatcattagtggtgcagctgcaggtttgtcagcagtttatcaagtccccctagctagtgtattctttgcttttgaaactttagctttaggaatctcactgaaaaatattgtgacattgctagcctctacttttggtgcagctagtattgctcaattagttatttcgacagcccctctttatcatatttcaaagatgagtctgaattcacagtcattagcttttatgttcttgatcgttttatgtgtaactccgattgcgattagctttagatatttaaatcaaaaagtgacagagagacgtattaaaaatataaaaatattgttaagtttgccagtagtgtcattgatagtatctgttttatcaatcgtctatccccagattttaggaaatggtaatgccctagttcaagaagtctttaaagggaccacagttagcttaatcgctattttagttgttctcaagatgatagcaacattatccactctttacgctggtgcttatggcggtatactgacaccatctttttccattggtgcttgtttaggttttttgttagctagtatttctattcctttacttccccacatatcgatagtaaccagtatgttggttggtgcagctatttttttagctattacaatgagagcgccactgacagctgtcggtttagtcatatcttttactggtcaatctgttataactattgttcccctaactatagcagtactttttgctactgcctatgattattttataagaaaaatgaggagtttatatgtcaatccatat

SEQ ID NO: 9884 - protein, 390 aa, Streptococcus agalactiae
MHYVLMFTEWLAFGDSRENTLSLLNSVTPIKRVLSLTLVSFLASLSWYYLQIKPKQITSIKQQVVFKDFSVKKSPYWLHIGHAFLQLIYVGTGGPIGKEGAPREFGAINAGKISDLLALKVLDKRLLIISGAAAGLSAVYQVPLASVFFAFETLALGISLKNIVTLLASTFGAASIAQLVISTAPLYHISKMSLNSQSLAFMFLIVLCVTPIAISFRYLNQKVTERRIKNIKILLSLPVVSLIVSVLSIVYPQILGNGNALVQEVFKGTTVSLIAILVVLKMIATLSTLYAGAYGGILTPSFSIGACLGFLLASISIPLLPHISIVTSMLVGAAIFLAITMRAPLTAVGLVISFTGQSVITIVPLTIAVLFATAYDYFIRKMRSLYVNPY

SEQ ID NO: 9885 - DNA, 786 bp, Streptococcus agalactiae
atggcattttttaatattgaatatcactctaaggtactaggaacggaacgtcaagtcaatgttatttacccagatgcttttgagatgtctgatgataaaattgatgattgtgacattcctgttttgtatcttctccatggaatggggggaaatgagaattcttggcaaaaacgcacaaatatagagcgtcttttacgtcatactaatcttatcgtcgtgatgccatcaacagacttagcatggtataccaacacaaagtatgggttggattattttgatgcaatagctatcgagttaccaaaagttttgaaacgtttctttcctaatatgtctgataagagagagaaaaatttcattgccggattatctatggggggatatggagcatataaaatagctctactgactaatcgtttttctcatgctgcctctttgtcaggtgcactttcttttgactttgatttattattcaataatggcaacaataacattaactattggtcgggaatttttggcgatttgaataacactgataacatagagcgtcattcactaaggcgttacgttgagtcttttgatatgaagactaaattttatgcatggtgtggttatgaagattttctttttgaagctaatgaagtcgcaattgatgaacttcgtcaattaggtttaactattgactatttcaatgatcatggtaaacatgaatggtattactggaatcaacaattagaaaaagtcttagaatggctccctgttgattatgtcaaagaagagcgcctttct

SEQ ID NO: 9886 - protein, 262 aa, Streptococcus agalactiae
MAFFNIEYHSKVLGTERQVNVIYPDAFEMSDDKIDDCDIPVLYLLHGMGGNENSWQKRTNIERLLRHTNLIVVMPSTDLAWYTNTKYGLDYFDAIAIELPKVLKRFFPNMSDKREKNFIAGLSMGGYGAYKIALLTNRFSHAASLSGALSFDFDLLFNNGNNNINYWSGIFGDLNNTDNIERHSLRRYVESFDMKTKFYAWCGYEDFLFEANEVAIDELRQLGLTIDYFNDHGKHEWYYWNQQLEKVLEWLPVDYVKEERLS

SEQ ID NO: 9887 - DNA, 759 bp, Streptococcus agalactiae
atggtgatgaaaatcatagagttaaaagaagcaaccgtacaagtcagtaatggtttagcagaaatgaaaacgatattagatcatgttaatttgagtatttatgaacatgacttcattacaatattgggtggaaatggagctggaaaatcaacgctttttaatgtaattgcaggtaccttgatgttaagcagtggaaatatttacatcatgggacaagatgttactaatttatcagcagaaaaacgagctaaatatttatcacgggtatttcaagatccgaaaatgggaacagcacctaggatgacagttgctgaaaatttattagttgctaaatttcgaggtgaaaagagaccgctagttcctagaaagattattaactatacggaagaatttcaaaaattgattgctagaactggtaatggacttgatcgccatttagagacacctacaggtttattatcaggtggacaaagacaagcgcttagtttattaatggcaactttgaaaaaaccaaatctgttattattggacgaacacacagcagcgcttgatcctagaacaagtgtttcgcttatgggcttgactgatgagtttatcaaacaagattcgttgactgccttaatgattacacatcatatggaagatgctctcaaatatggaaatcgtgtattagtaatgaaagatggcaagattgtcagagatttaaatcaggcacaaaaaaacaagatggctatagctgactattatcaattatttgat

SEQ ID NO: 9888 - protein, 253 aa, Streptococcus agalactiae
MVMKIIELKEATVQVSNGLAEMKTILDHVNLSIYEHDFITILGGNGAGKSTLFNVIAGTLMLSSGNIYIMGQDVTNLSAEKRAKYLSRVFQDPKMGTAPRMTVAENLLVAKFRGEKRPLVPRKIINYTEEFQKLIARTGNGLDRHLETPTGLLSGGQRQALSLLMATLKKPNLLLLDEHTAALDPRTSVSLMGLTDEFIKQDSLTALMITHHMEDALKYGNRVLVMKDGKIVRDLNQAQKNKMAIADYYQLFD

SEQ ID NO: 9889 - DNA, 717 bp, Streptococcus agalactiae
atgtcagaaacagttaaattatttcaatacagtaccttgagttcactgatggcaggattgtacaaaggcagtctaactatcggagaattattaactcacggtgacttaggaatcggtactgttcatatgattgatggtgaattgattgtattggatgggaaagcttatcaagctattggtacagatggtaaagcagagattatccaattatcagatgatgtgacagtaccctatgcagcggttttaccacaccatatccaaaaacaatttgatatcaatgctgagatagataataaggatttggaagagatgattctaaaaaactttgaaggtcaaaatctctttaagtctttaaaaatcaaaggaacgttttcaagaatgcacgttcgtatgattccaaaatctccacaacataaacgttttgcagatattgcatctaatcagccagaatttaccagagagaatgtatctggtacgttggttgggatttggacgccggaattatttcatggtgtgggggtaaaagggttccatgtccactttatttcagacgatttaactttcggtgggcatgttatggattactcgctcacacaaggaaaagttgaaattggaaaggttgaccaacttgaccaatgtttcccaactcaagatcaagaatttttgaaagctaactttgacctacaaaagcttagagaagatattgatttaagtgaa

SEQ ID NO: 9890 - protein, 239 aa, Streptococcus agalactiae
MSETVKLFQYSTLSSLMAGLYKGSLTIGELLTHGDLGIGTVHMIDGELIVLDGKAYQAIGTDGKAEIIQLSDDVTVPYAAVLPHHIQKQFDINAEIDNKDLEEMILKNFEGQNLFKSLKIKGTFSRMHVRMIPKSPQHKRFADIASNQPEFTRENVSGTLVGIWTPELFHGVGVKGFHVHFISDDLTFGGHVMDYSLTQGKVEIGKVDQLDQCFPTQDQEFLKANFDLQKLREDIDLSE

SEQ ID NO: 9891 - DNA, 1224 bp, Streptococcus agalactiae
atgttgaatagtgaaaaaatgattgtttctatccaaaatcaggatttagaacatgctaacaagtatttcgaaaaagcgttgaaaaatgatcctgaggaagtcttgttggaactaggagcttatttggagagtattggttttttaccccaagcaaaacgtctctatgatcaaatccgaccaaattatccagaagttgctatcaatttagctcaaattgttgccgaagatggagatattgaacaagcattcttatacttagattatatctcagaagatagtcaagagtatgtttcagccctccttgttatggctgacttatatgatatggaaggcttgactgatgttgcgcgtgaaaagcttttgctagccagcaaacttagcgatgacccattggttacatttggtttagctgaaatgaaccttagtttggaacattatcaagaagcgatagaaggatatgcctcacttgacaatcgagaaatcttagaaacgactggagtttcaacttatcagcgtattggtaaatcctacgctattatggggaaatttgatgcagctatcgaatttttagaaaaagccgttgacattgagtatgatgatttaacagtttttgagttagcaacaatcctttatgatcaagaagaatatcaaaaagctaacctttattttaaacagttggatactattaatccagactttgctggctatgaatatatctatggtttatctcttcgtgaggagcataaatctgaagaagctttacgtctagttcagcaaggtattcgtaaaaatagttttgatggtcaacttctcttactagcctcacaattatcgtatgaattacatgatgttcattcgtcggagtcttatttgaaacaagctgaaaaagtttctgaaaatcaagatgaaattgttatgagattgtcaaatttgtatcttgaagaagagcggtttgaggaagtcttggaattagacaatgataatttagaaaatatccttgcaaaatggaatatcgctaaagcacacaaggctttagaaatggatgatagtgtagactattatcaatctttgtataatgatttaaaagataatccagaatttttacaagattatgcttacattttgagagaatttggttaccttgataaggcacaagaagtaggaaaggcttatttaaaattagttccagatgatatagagatgtcagaatgggtgaataacatt

SEQ ID NO: 9892 - protein, 408 aa, Streptococcus agalactiae
MLNSEKMIVSIQNQDLEHANKYFEKALKNDPEEVLLELGAYLESIGFLPQAKRLYDQIRPNYPEVAINLAQIVAEDGDIEQAFLYLDYISEDSQEYVSALLVMADLYDMEGLTDVAREKLLLASKLSDDPLVTFGLAEMNLSLEHYQEAIEGYASLDNREILETTGVSTYQRIGKSYAIMGKFDAAIEFLEKAVDIEYDDLTVFELATILYDQEEYQKANLYFKQLDTINPDFAGYEYIYGLSLREEHKSEEALRLVQQGIRKNSFDGQLLLLASQLSYELHDVHSSESYLKQAEKVSENQDEIVMRLSNLYLEEERFEEVLELDNDNLENILAKWNIAKAHKALEMDDSVDYYQSLYNDLKDNPEFLQDYAYILREFGYLDKAQEVGKAYLKLVPDDIEMSEWVNNI

SEQ ID NO: 9893 - DNA, 786 bp, Streptococcus agalactiae
atgaaagctagagaacttattgatgtatatgaaacttattgtccacaggaattatctatggaaggagatatttcaggtcttcaaattggatctttagataaagaaataaagacagtcatggtagctttagatgttcgagagactacagtagctgaagcaattgaacgtcaagtagatcttcttattgtaaagcatgctcctatttttcgtccattaaaggatttggtagcaacgccgcaaaataagatttatatagaccttcttaaatcagacattgctgtttatgtgagccatactaatatagatatcgttcctaatggacttaacgactggttttgtgaattattagatattcaatatcccgatatattatctgagacaagtaatggttatggtattggtcgcattggtgatattagaccccagagttttgaattttttgcatggaaaattaaagatgtgtttggtttagatagcgttcgtttagtttcatatgataaatctaatcctgaaattcaacgagttgctatttgtgggggtagtgggcaaagtttctacaaagaagctattgcaaaaggagcagatgtttttgtaacgggagatatttattatcatactgcacaagaaatgatcacaaatggtttgcttgcgattgacccaggtcatcatattgaggttttatttgtttctaaaatagctactatgattgagcagtggaaacttgaaaaaggctgggatatttcagttttagagagtaaagctccaacaaatcccttttaccatatg

SEQ ID NO: 9894 - protein, 262 aa, Streptococcus agalactiae
MKARELIDVYETYCPQELSMEGDISGLQIGSLDKEIKTVMVALDVRETTVAEAIERQVDLLIVKHAPIFRPLKDLVATPQNKIYIDLLKSDIAVYVSHTNIDIVPNGLNDWFCELLDIQYPDILSETSNGYGIGRIGDIRPQSFEFFAWKIKDVFGLDSVRLVSYDKSNPEIQRVAICGGSGQSFYKEAIAKGADVFVTGDIYYHTAQEMITNGLLAIDPGHHIEVLFVSKIATMIEQWKLEKGWDISVLESKAPTNPFYHM

SEQ ID NO: 9895 - DNA, 825 bp, Streptococcus agalactiae
atgtttgattgtggagagggtacacagcgtcaaattttagaaactacgattaaacctcgtaaagttaaaaaaatttttatcacgcacatgcacggagaccatgtttttggtcttccaggttttttatccagtcgggcttttcaagccaatgaagagcagacagatttagatatttatggaccggttggtataaaaagttttgttatgactgccttaaggacatcaggttcacgtttaccttatcgaatccattttcacgagtttgatgaatcatcactcggaaaaattatggaaacagataaatttaccgtttatgcagaaaagctagatcatactatcttttgtatgggatatcgtgttgtgcaaaaagatcttgagggcactttagatgctgaagcattgaaactagcaggtgttccatttggtcctctttttgggaaagtcaaaaatggtgagaatgttaccttagaagatggtagagaaattattgctaaagattatatttctgaaccgaaaaagggtaaagtaatcactattttgggagatactagaaaaacagatgcaagtattaggttagctttgggcgctgatgttttagttcacgaatctacttatggtaagggtgatgagcgaattgctaaatcgcatgggcattcaaccaatatgcaagcagctgatatcgctaaacaagcaaatgctaaacgactattattaaatcatgttagtgctcgttttatggggcgagattgttggcaaatggaagaagatgcaaagacgattttttcaaatacccatcttgttagagatttggaagaagtaggtata

SEQ ID NO: 9896 - protein, 275 aa, Streptococcus agalactiae
MFDCGEGTQRQILETTIKPRKVKKIFITHMHGDHVFGLPGFLSSRAFQANEEQTDLDIYGPVGIKSFVMTALRTSGSRLPYRIHFHEFDESSLGKIMETDKFTVYAEKLDHTIFCMGYRVVQKDLEGTLDAEALKLAGVPFGPLFGKVKNGENVTLEDGREIIAKDYISEPKKGKVITILGDTRKTDASIRLALGADVLVHESTYGKGDERIAKSHGHSTNMQAADIAKQANAKRLLLNHVSARFMGRDCWQMEEDAKTIFSNTHLVRDLEEVGI

SEQ ID NO: 9897 - DNA, 888 bp, Streptococcus agalactiae
atgagaaaaatcaaacttatagcagttgttggtccaactgcggttgggaagacagcattaggaattgaattagctaaaactttcaatggcgaaatcattagtggtgatagtcagcaagtttatcagaagttagatatcggaacggctaaagctagtaaagaagagcaagaacaagcttatcatcacttgattgatgttcgtgaagtaaatgagaactattcggtttatgatttcgtcaaagaggcaaaagtagctattgatacgattatttctaaggggaaaattcctattattgttggaggtactggcctatatttacagagtttgtttgagggctatcatttaggaggcgaagtcaatcaagaaactcttatggcctatcgtgaaaaattagagtctctaagtgatgaagatttatttgaaaagttgacagaacaatccattattataccacaagttaatcgtcgacgtgccattcgtgcattagaattggcgaagtttgggaatgatttgcaaaatagtgaaagtccgtatgatgttttattaattggattgaatgatgatcgtcaggtgctttatgatcgtatcaatagacgagttgatttgatgatggacaatggtctcttagatgaagctaaatggctatacgataactacccgagtgttcaagcaagtaaaggaattggctataaagaattatttccttacttttcaaagcaaataccattagaagaagctgttgataaactaaaacaaaataccagacgttttgcaaaacgccaattaacatggtttagaaaccgtatgaatgtcgaatttattatggttggtgaggaaaattatcaacaaaaaatcaagcgaaaagtcagtgattttttatcatcaaag

SEQ ID NO: 9898 - protein, 296 aa, Streptococcus agalactiae
MRKIKLIAVVGPTAVGKTALGIELAKTFNGEIISGDSQQVYQKLDIGTAKASKEEQEQAYHHLIDVREVNENYSVYDFVKEAKVAIDTIISKGKIPIIVGGTGLYLQSLFEGYHLGGEVNQETLMAYREKLESLSDEDLFEKLTEQSIIIPQVNRRRAIRALELAKFGNDLQNSESPYDVLLIGLNDDRQVLYDRINRRVDLMMDNGLLDEAKWLYDNYPSVQASKGIGYKELFPYFSKQIPLEEAVDKLKQNTRRFAKRQLTWFRNRMNVEFIMVGEENYQQKIKRKVSDFLSSK

SEQ ID NO: 9899 - DNA, 348 bp, Streptococcus agalactiae
atggaatttgccataggccgtgtggaagcgcacgttttagctcactttgattatggttttcgtaagttaaacttagatgtagaagatttaaaaccgtttgaaacgcaattgaagcgcattttcataaagatgttatctaaggggttagcttttgaactaaataccaaatccctttatctatatgggaatgaaaaactttatcgctatgctttagagatactcaaacagcttggttgtaaacaatactctataggctctgacggtcatattcctgaacatttttgttatgaatttgatagacttcaaggtctgctaaaggactatcaaattgatgaaaatcatttgata

SEQ ID NO: 9900 - protein, 116 aa, Streptococcus agalactiae
MEFAIGRVEAHVLAHFDYGFRKLNLDVEDLKPFETQLKRIFIKMLSKGLAFELNTKSLYLYGNEKLYRYALEILKQLGCKQYSIGSDGHIPEHFCYEFDRLQGLLKDYQIDENHLI

SEQ ID NO: 9901 - DNA, 552 bp, Streptococcus agalactiae
atgctacgagcattaaaagaagatttttttctaaccttaacctctttaaaaaatcaattttgggtttacattggaactggtatcttaatccaaactttagttgcttatttagtaaaaggaattctgagttttatctttcgtcggatattgatattgtcaaatactcccgcagtgactaaagacaattggactttactttttaatcatcccttagctttattactctttatactttatatcgtaatcctaattgggttcatctatactgagttcgctatctatactattgccatactgaaaactgaattttctctcagtatcaaaaaatggctaacaatctttcctaaaaaaataaaatcacttttaggaccacagctaatttgggtatcaatctacttacttttgacaattcctctagctaaccttggtctaaggtcaagtatactagagcatcttaaaattcctgactttatttctggcgagttaacaaagacagtctttggaaagataggttactctacccttttactgcttatttgttacttaaacctt

SEQ ID NO: 9902 - protein, 184 aa, Streptococcus agalactiae
MLRALKEDFFLTLTSLKNQFWVYIGTGILIQTLVAYLVKGILSFIFRRILILSNTPAVTKDNWTLLFNHPLALLLFILYIVILIGFIYTEFAIYTIAILKTEFSLSIKKWLTIFPKKIKSLLGPQLIWVSIYLLLTIPLANLGLRSSILEHLKIPDFISGELTKTVFGKIGYSTLLLLICYLNL

SEQ ID NO: 9903 - DNA, 759 bp, Streptococcus agalactiae
atgccacactcaagttattactatcaagccgtggagtcagtatctgaaacggagtttgaagaaactattaaaagaattttcctcgatagcgagtccagatacggatccagaaaaatcaaaatatgcttgaataacgaaggtatcacactttcacgtcgtcggattcgacgcattatgaagcgactcaatttggtttctgtttatcagaaagccaccttcaaaccacattctagaggcaagaatgaagcccctattcccaaccacttagacaggcaatttaagcaagaaagaccactacaggccttagtcactgacttaacctatgttcgtgtaggcaatcgttgggcttatgtttgcctcatcattgacctatacaaccgtgaaatcatcggcctgtctcttggttggcacaagaccgctgaactcgttaagcaagccatacaaagcatcccttacgccctgaccaaagtcaagatgttccattcagatcgtggcaaagagtttgataatcagttaattgatgaaatattggaagcctttggaatcacacgttcgcttagtcaggctggttgtccttatgacaatgccgtagctgaaagtacgtatcgtgctttcaaaattgaatttgtttatcaagaaacctttcaattgctggaagaactagctcttaagactaaagactatgttcattggtggaattaccaccgcattcatggtagtctcaactaccaaacaccaatgactaaaagattaattgcc

SEQ ID NO: 9904 - protein, 253 aa, Streptococcus agalactiae
MPHSSYYYQAVESVSETEFEETIKRIFLDSESRYGSRKIKICLNNEGITLSRRRIRRIMKRLNLVSVYQKATFKPHSRGKNEAPIPNHLDRQFKQERPLQALVTDLTYVRVGNRWAYVCLIIDLYNREIIGLSLGWHKTAELVKQAIQSIPYALTKVKMFHSDRGKEFDNQLIDEILEAFGITRSLSQAGCPYDNAVAESTYRAFKIEFVYQETFQLLEELALKTKDYVHWWNYHRIHGSLNYQTPMTKRLIA

SEQ ID NO: 9905 - DNA, 258 bp, Streptococcus agalactiae
atggcttactaccaggcttgcacggaaaaagacattatccgctcaatgtctcgaaaaggaacacctgcagataatgcctgtattgaatggtttcacaccgtcctaaagactgaaaccttttatttccataataggagaaaatacaacaaagatagtataacaaatattgttaaaaattacattacattttataatgaaactagaattcaacagagattaaacgaccagtcgcctgtacagtacagaaaactgattgcc

SEQ ID NO: 9906 - protein, 86 aa, Streptococcus agalactiae
MAYYQACTEKDIIRSMSRKGTPADNACIEWFHTVLKTETFYFHNRRKYNKDSITNIVKNYITFYNETRIQQRLNDQSPVQYRKLIA

SEQ ID NO: 9907 - DNA, 231 bp, Streptococcus agalactiae
atgcattctttttctaatcctggatatccttatgataatgccgtaactgaagcatttttcaagtatttaaagcatagacaaatcaaccgaaaacattatcaaaatatcaaacaggttcaattagactgctttgaatacattgagaatttttataacaattacaacccacatacggctaatctaggactaacccctaatcagaaagaagaaaattattttaacgcaataaaa

SEQ ID NO: 9908 - protein, 77 aa, Streptococcus agalactiae
MHSFSNPGYPYDNAVTEAFFKYLKHRQINRKHYQNIKQVQLDCFEYIENFYNNYNPHTANLGLTPNQKEENYFNAIK

SEQ ID NO: 9909 - DNA, 1275 bp, Streptococcus agalactiae
atgtcagaattgctagataagatattatctcggaacaatatgctcgaagcttacaagcaagtgaaatcaaacaaaggttctgctggtatcaatggggtcactatcgagcagatggatgactatcttcaccaaaattggcgagaaaccaagcaactcatcaaagagaggagctataaacctcaaccggttctcagggttgaaatcccaaaaccaaacggaggagttcgtaacctaggtatcccgacggctatggatagaatgattcagcaggccatcgttcaagttttgagtccactctgcgaaaaacatttttcagagtatagctatgggttcagacccaatcgctcctgcgaaacagccattgttcagctacttgagtatttaaacgatggctacgagtggattgtggacattgacttggaaaagttcttcgatactgttccgcaagacagattgatgtccctggttcataatatcattcaagatggcgatacggagtcactgattcgtaagtacctccattcgggagttgttattaacggacagcgacataagactttagtcgggacacctcaaggcgggaatctatcacccctcctatctaatattatgcttaatgagttagacaaagggttggaaaagcgaggtcttcgctttgtccgttacgccgatgactgtgtcatcactgtcggaagcgaagcagctgctaagcgggtcatgcattcggtcagtagctatattgagaagcgattagggttgaaagtcaacatgactaagaccaagattgtcagaccgaacaaactcaaatacctcggatttggtttctggaaatctccaaaaggttggaagtgtcgtcctcaccaagacagcgttcagagctttaagcgaaaactgaagcaactgacgatgaggaaatggagcattgacctgataactcgcattgaacgattgaactgggtcattcgaggatggataaactatttctcgcttggcaatatgaagagtatcatgacacaaatagatgagcgtctgcgaacccgtattcgagtgattatctggaagcaatggaagaagaaagcaaagcgcctatggggactcttaaaactaggagttgctagatggatagccgataaagtttctggatggggtgaccactatcagttggtagctcagaagtcggtactcaaacgtgctatatcaaaaccagccctcgcaaagcgaggactggtcagttgcttagattactatcttgaacgacatgcgttaaaagttagt

SEQ ID NO: 9910 - protein, 425 aa, Streptococcus agalactiae
MSELLDKILSRNNMLEAYKQVKSNKGSAGINGVTIEQMDDYLHQNWRETKQLIKERSYKPQPVLRVEIPKPNGGVRNLGIPTAMDRMIQQAIVQVLSPLCEKHFSEYSYGFRPNRSCETAIVQLLEYLNDGYEWIVDIDLEKFFDTVPQDRLMSLVHNIIQDGDTESLIRKYLHSGVVINGQRHKTLVGTPQGGNLSPLLSNIMLNELDKGLEKRGLRFVRYADDCVITVGSEAAAKRVMHSVSSYIEKRLGLKVNMTKTKIVRPNKLKYLGFGFWKSPKGWKCRPHQDSVQSFKRKLKQLTMRKWSIDLITRIERLNWVIRGWINYFSLGNMKSIMTQIDERLRTRIRVIIWKQWKKKAKRLWGLLKLGVARWIADKVSGWGDHYQLVAQKSVLKRAISKPALAKRGLVSCLDYYLERHALKVS

SEQ ID NO: 9911 - DNA, 606 bp, Streptococcus agalactiae
atggttaagaaaaaagtaaagaaaaaaagtggttgtggtggatgtttaagtttaataatagtgataattattgttagtagtgttataaatttatttacaggttctgaaagcagtaatacttctaaaaagaataagacaaatcctagtggtgcgacaagtgcaaaagtcgttaaacacaaaaaaactgatgaagaacgagcagaagattatataaaaacgttaggattaaacccgagtgattatataaaagaaatggattattcaaaggttgattttaggggggatttatcatcagtatcaggtaattataataattttactgttgaaaacatcaatcaaacttttgaaaaaggtgataaatctttaaaagatattattgaaatttttggaaagcctgatacaatttgggttaattacgttgacaatcagtacaatactgatttgtactggaaaaaagatgacacagatgattctaattatattcatgcagaatggtctgagccaaaagatgaatatgatgttcaaagtttaagtggcacggcttcaaattcaggtactggcaagtttcagtcattcattggattagatggatttgagcctgcacag

SEQ ID NO: 9912 - protein, 202 aa, Streptococcus agalactiae
MVKKKVKKKSGCGGCLSLIIVIIIVSSVINLFTGSESSNTSKKNKTNPSGATSAKVVKHKKTDEERAEDYIKTLGLNPSDYIKEMDYSKVDFRGDLSSVSGNYNNFTVENINQTFEKGDKSLKDIIEIFGKPDTIWVNYVDNQYNTDLYWKKDDTDDSNYIHAEWSEPKDEYDVQSLSGTASNSGTGKFQSFIGLDGFEPAQ

SEQ ID NO: 9913 - DNA, 228 bp, Streptococcus agalactiae
atggcatttgaaccaaaaaattcggaactaacaaaagttctaaaagaaagtttagatgaagaaaagaaagaaattttctcatctgaaatgaatattagggactttgaacgtacaaaacaatatcaatttacacttcaaccttcagtccgaaaaaaaattgataggctatcaaaagaaaaaggctatcgttcagcatcatcttttataaatgacttttttaaaaatttg

SEQ ID NO: 9914 - protein, 76 aa, Streptococcus agalactiae
MAFEPKNSELTKVLKESLDEEKKEIFSSEMNIRDFERTKQYQFTLQPSVRKKIDRLSKEKGYRSASSFINDFFKNL

SEQ ID NO: 9915 - DNA, 759 bp, Streptococcus agalactiae
atgccacactcaagttattactatcaagccgtggagtcagtatctgaaacggagtttgaagaaactattaaaagaattttcctcgatagcgagtccagatacggatccagaaaaatcaaaatatgcttgaataacgaaggtatcacactttcacgtcgtcggattcgacgcattatgaagcgactcaatttggtttctgtttatcagaaagccaccttcaaaccacattctagaggcaagaatgaagcccctattcccaaccacttagacaggcaatttaagcaagaaagaccactacaggccttagtcactgacttaacctatgttcgtgtaggcaatcgttgggcttatgtttgcctcatcattgacctatacaaccgtgaaatcatcggcctgtctcttggttggcacaagaccgctgaactcgttaagcaagccatacaaagcatcccttacgccctgaccaaagtcaagatgttccattcagatcgtagcaaagagtttgataatcagttaattgatgaaatattggaagcctttggaatcacacgttcgcttagtcaggctggttgtccttatgacaatgccgtagctgaaagtacgtatcgtgctttcaaaattgaatttgtttatcaagaaacctttcaattgctggaagaactagctcttaagactaaagactatgttcattggtggaattaccaccgcattcatggtagtctcaactaccaaacaccaatgactaaaagattaattgcc

SEQ ID NO: 9916 - protein, 253 aa, Streptococcus agalactiae
MPHSSYYYQAVESVSETEFEETIKRIFLDSESRYGSRKIKICLNNEGITLSRRRIRRIMKRLNLVSVYQKATFKPHSRGKNEAPIPNHLDRQFKQERPLQALVTDLTYVRVGNRWAYVCLIIDLYNREIIGLSLGWHKTAELVKQAIQSIPYALTKVKMFHSDRSKEFDNQLIDEILEAFGITRSLSQAGCPYDNAVAESTYRAFKIEFVYQETFQLLEELALKTKDYVHWWNYHRIHGSLNYQTPMTKRLIA

SEQ ID NO: 9917 - DNA, 1197 bp, Streptococcus agalactiae
atggcaacaaaaagtagtaaaaaatacaaaggtgtttattgtgataataagggaaagatattttatcagattgatcttggaatcgacccagtaactggcaaaagggtacaaaagaaagctagaaaaaatcaatatggtaaaacctttgaaacaatgaaagaagcatatgacgaattagttcgtataaaatatgaatttgccaacaaagtcagtttagaaaattacaatatgacttttgaaaactatatgaacaaaatttatttaagagcatataagcaaaaggttcagtctgtgacatataagacggctcttcctcatcataaactttttattcaatattttggtttaaagccattaaaagcaataactcctagagattgcgaagcttttagattgcatatcatagagaattattctgaaaactatgcgaaaaatttatggtcaaggtttaaagcttgtatgggttatgcagaaagacttggctatatttcaaatatgccttgtaaagcattagataatcctagaggtaaacatccagaaactccattttggacctatgcggagtttcagacatttatcaaatcatttgacttacatgattatgaagaattgcaacgatttactgccatctggttatattatatgacaggtgtacgagtgagcgaaggtttatctttatgttgggaggatattgattttgataaaaaatttctaaaggtacatacaaccttagagaaagatgaaaatggtaattggtatcgtaaagaccaaacaaagactccagcaggtgaacgacttattgaattggatgatattactattgaagtacttcaagtttggcgaaaaaatcagtttgcaaatcaagatacagattttatcatttcaagatttggagatcctttttgcaaatcaaccatttgtcgcatcatcaaacggaaagctcaacaggtaggagttccagtaattacaggaaaaggtctcagacatagccatgcatcctatctaatcaatgtcttgaaaaaagatattttatatgtagccagacgtatgggacatgccgataaatcaacaactttgaatacttacagtcactggtttaatgctttagataaaacagtttctgaagaaatcacacaaaatatcaaaagtgcaggattggattcaattttatgccaaaattcctgccaaacttcaaat

SEQ ID NO: 9918 - protein, 399 aa, Streptococcus agalactiae
MATKSSKKYKGVYCDNKGKIFYQIDLGIDPVTGKRVQKKARKNQYGKTFETMKEAYDELVRIKYEFANKVSLENYNMTFENYMNKIYLRAYKQKVQSVTYKTALPHHKLFIQYFGLKPLKAITPRDCEAFRLHIIENYSENYAKNLWSRFKACMGYAERLGYISNMPCKALDNPRGKHPETPFWTYAEFQTFIKSFDLHDYEELQRFTAIWLYYMTGVRVSEGLSLCWEDIDFDKKFLKVHTTLEKDENGNWYRKDQTKTPAGERLIELDDITIEVLQVWRKNQFANQDTDFIISRFGDPFCKSTICRIIKRKAQQVGVPVITGKGLRHSHASYLINVLKKDILYVARRMGHADKSTTLNTYSHWFNALDKTVSEEITQNIKSAGLDSILCQNSCQTSN

SEQ ID NO: 9919 - DNA, 222 bp, Streptococcus agalactiae
atgtaccgacgtttaagggatttgagagaagacaatgatttcactcaaaaatacgttgccgaaaagctttcgtttacccactctgcttattcaaaaattgagagaggagaacgtattttatcggcagatgtaataataaaactttcaaatctatataacgttagtacagattatttgttggggcaaactgactttccccaccgaataaagaataatttaaaa

SEQ ID NO: 9920 - protein, 74 aa, Streptococcus agalactiae
MYRRLRDLREDNDFTQKYVAEKLSFTHSAYSKIERGERILSADVIIKLSNLYNVSTDYLLGQTDFPHRIKNNLK

SEQ ID NO: 9921 - DNA, 1305 bp, Streptococcus agalactiae
atgtcagacttattatccctaccagacattaaaacaatagaaccgccacaagaaaatgaaaccgatatgatgtttaaagttgaagcagtcggaccacctgaacgttgtcctgaatgtggttttgacaagttgtacaaacacagttcaagaaatcaactaattatggatttgcccattcgtttaaagcgagtgggcttacatttgaaccgtagacgatacaagtgtcgtgaatgcggatctaccatatctgtagatgaaaagcgtagtatgaccaaaaggcttttaaagtccattcaagagcaatccatgtctaagacctttgtagaagtcgcagaaagcgttggtgttgacgagaaaaccattaggaacgtttttaaggactatgtggcactcaaagaacgtgaataccagtttgaaactcctaagtggcttgggatagacgagatacatattatccgtagacctcggcttgtattgactaatattgaacgcaggactatttatgacatcaagcctaaccgtaacaaggaaacagtcatccaacgtctttcagaaatcagtgacaggacttacattgagtacgtcacaatggatatgtggaagccctacaaagacgcagtgaacactatccttccacaagctaaagttgtcgtagataagtttcatgtagttagaatggctaatcaagccttagataacgtcagaaagtctttgaaagcccatatgagccaaaaagaaagacgtacccttatgcgtgaaaggtttatccttctaaagcgtaaacacgatctaaatgaacgtgaatcattcctcttagatacttggttaggtaatcttcctgctttaaaagaagcctatgaactcaaagaagagttttactggatatgggatactcctgatccagatgaaggtcatcttcgttatagtcaatggagacaccgttgtatgtccagcaactctaaagacgcatataaagacctcgtgagagccgtagacaactggcatgttgaaatattcaactactttgataaaaggctcactaatgcttatacggagtcaattaacagcattattaggcaggtagagcgaatgggtagaggttactcgtttgatgccttacgagccaaaatccttttcaatgagaagctccataaaaagcgtaagccacgatttaattcaagtgctttcaataaagctatgttatacgatactttcaattggtatgaagtgaatgatcacgacattacagacaacttaggtgtcgatttttccacacttattaagaatttggagaagggtgattta

SEQ ID NO: 9922 - protein, 435 aa, Streptococcus agalactiae
MSDLLSLPDIKTIEPPQENETDMMFKVEAVGPPERCPECGFDKLYKHSSRNQLIMDLPIRLKRVGLHLNRRRYKCRECGSTISVDEKRSMTKRLLKSIQEQSMSKTFVEVAESVGVDEKTIRNVFKDYVALKEREYQFETPKWLGIDEIHIIRRPRLVLTNIERRTIYDIKPNRNKETVIQRLSEISDRTYIEYVTMDMWKPYKDAVNTILPQAKVVVDKFHVVRMANQALDNVRKSLKAHMSQKERRTLMRERFILLKRKHDLNERESFLLDTWLGNLPALKEAYELKEEFYWIWDTPDPDEGHLRYSQWRHRCMSSNSKDAYKDLVRAVDNWHVEIFNYFDKRLTNAYTESINSIIRQVERMGRGYSFDALRAKILFNEKLHKKRKPRFNSSAFNKAMLYDTFNWYEVNDHDITDNLGVDFSTLIKNLEKGDL

SEQ ID NO: 9923 - DNA, 594 bp, Streptococcus agalactiae
atgttaaatcaatattttctgcattttgaagagagtaaaatagttactcccttatatgctttcgacattgattatctgaatattcctaaatatgtcggtctatcaaaggagcagattctggaaaactaccgcatcctcctgacctatttgaatatcccatggtttctcgcattggatatgccggatttccctagttcggctagtgggcttttccactttttcgaggtcaagaagctttttatgctggactacctgatcttgatcttttctggaatgggcacgctatggtttgtacgacatctaaataggagacgagaatcttggcggctcctaccctacttccgccagggaacccttattccccttgctatccttttggctctcctggttagcttcgacacgctgtttgtgcttttccataaagttttctttaacaatgacgcctggctcttcaatgccactactgatcctattatcttagctttacctgccgagttctttatgcacagtttcctcttggcctttggattaatcgaagtcttcctaatcctggggtacttcactactaaatatcgaatctctgccccaagccgt

SEQ ID NO: 9924 - protein, 198 aa, Streptococcus agalactiae
MLNQYFLHFEESKIVTPLYAFDIDYLNIPKYVGLSKEQILENYRILLTYLNIPWFLALDMPDFPSSASGLFHFFEVKKLFMLDYLILIFSGMGTLWFVRHLNRRRESWRLLPYFRQGTLIPLAILLALLVSFDTLFVLFHKVFFNNDAWLFNATTDPIILALPAEFFMHSFLLAFGLIEVFLILGYFTTKYRISAPSR

SEQ ID NO: 9925 - DNA, 1413 bp, Streptococcus agalactiae
atgggctatgtcgactactcaaaagaacctcgtagcgatattgcttttgtcgatatgaaatccttctatgcatctatcgaatgtgtagagagaggacttcacccgcttcatacttcactttgtgtgatgagtagggcagataattcagctggtctaattctagcttcttctccaatgttcaaaaaagtctttggtaaaggaaatgttggcagagcctacgacctcccctttgatgttcataccagaaaatttaactactaccgtgctaaaatttcaggattgccaacggatgcaaaatttgtttccttcatagaaaattgggccaagcgtacatttattgtgccaccgagaatggacttgtacattcaaaaaaatcttgaaatacaaaaagtatttcaaaattatgcagatccgacagatattctgccctattctattgatgaaggatttattgacttaacttcatcgctaaattattttgttgaagacaaatctctgagtcgcaaagataagttagatgtggtttcagcaaaaattcaacacgatatttgggaaaaaacgggtgtctattcaactgttggaatgagtaatgccaatccacttctagctaagttagcacttgataacgaagctaaaaccactgctaccatgcgtgccaattggtcttatgaagatgttgaaacgaaggtctggaatattcccaaaatgactgacttttggggaataggttcacgaacagaaaaacgactaaacaaattgggaatctacagcattaaagaattggccaactgtgaccctactatcttgaaaaaagaatttggtgttattggagtacaacattggtttcatgctaatggcatcgatgaaagtaatgtccatgaaccttatcgccctaaagcagtcgggattgggaattcgcaagtgctccataaagattacactcgtcaaagtgatatagagcttgtcctgcgtgagatggcagagcaagttgcgattcggctacgcagaagacataaaaaagcaactgtagtcgccataaatgtaggctattcaaatttcgaaaacaagaaatcaatcaatgttcagagaaaaattaacccaaataatcgtacgcttgtttttcaagatgaagttgtttctctctttcgttctaaatacgatggaggggcagttagaagcattgctgtaaggtacgatggattggtggatgaaaactttgctgtgatttctctttttgatgactttgaagaaagcgaaaaagaggaaaaattggagacaaccattgattccattcgtgatcgttttggatttcttgctgtacagaaagctagttctttattagaaaattcaagggcaatttctcgcagtagattagtcggcggacattccgctggaggattggagggtttaaaa

SEQ ID NO: 9926 - protein, 471 aa, Streptococcus agalactiae
MGYVDYSKEPRSDIAFVDMKSFYASIECVERGLHPLHTSLCVMSRADNSAGLILASSPMFKKVFGKGNVGRAYDLPFDVHTRKFNYYRAKISGLPTDAKFVSFIENWAKRTFIVPPRMDLYIQKNLEIQKVFQNYADPTDILPYSIDEGFIDLTSSLNYFVEDKSLSRKDKLDVVSAKIQHDIWEKTGVYSTVGMSNANPLLAKLALDNEAKTTATMRANWSYEDVETKVWNIPKMTDFWGIGSRTEKRLNKLGIYSIKELANCDPTILKKEFGVIGVQHWFHANGIDESNVHEPYRPKAVGIGNSQVLHKDYTRQSDIELVLREMAEQVAIRLRRRHKKATVVAINVGYSNFENKKSINVQRKINPNNRTLVFQDEVVSLFRSKYDGGAVRSIAVRYDGLVDENFAVISLFDDFEESEKEEKLETTIDSIRDRFGFLAVQKASSLLENSRAISRSRLVGGHSAGGLEGLK

SEQ ID NO: 9927 - DNA, 294 bp, Streptococcus agalactiae
atgaaattttttcaaaagaaaaaacaaaaccaggatcaattcaaacgactgattcatcgactatcagagatgtcagatagtgaactaaccaaagtagaacaactcctagatgtggtttttgatacaaattttaagcctgatacgagcgttgaattatctcaaagcgatataactgacgaggatcaaagtcttgataggtcaatccaggaagcgaaaaataaacttcacacggaacaattggaaaaaaacattgagaggtttagacaaggtaggcgagagagcaataataacaaa

SEQ ID NO: 9928 - protein, 98 aa, Streptococcus agalactiae
MKFFQKKKQNQDQFKRLIHRLSEMSDSELTKVEQLLDVVFDTNFKPDTSVELSQSDITDEDQSLDRSIQEAKNKLHTEQLEKNIERFRQGRRESNNNK

SEQ ID NO: 9929 - DNA, 6822 bp, Streptococcus agalactiae
atgaatcaagaagtcttactacaaatgatgagagccactattcctcgtgatagagccttgcttgaggcatttttatattaccaagcagagcattttgatgaggagtgggatagtcttattcatcagtttatgaccaataggcaagaaataaataagtctgttcaagtacttcactttgagacagatgtttcagcttttgtccaggctagtccttatgatactgctcatgatctattgacctatacacaagttttcggccaaagtggtcttcaaaaactagataaactatcgccgtctgaaaaaaacttggtgatagaagtggccttgttcaatctggccactcgttttcaattattggattccaatggacactaccaaaccatatcgccggattcactcttacaaaagagtaggggagctaatttggtcaatgtgtatcgtgtggctaataatttagcggatcgtattagtcgagatattgaacagtttctcttaacttacgagcctgagcttgaaactagagctgatgaaactgttctagaaaatgaagaaactgttgatgagcacaaaacaagtgttcatcaagcaatatcttttcgagaagagggctctctggttattgctagtttggatgtagatttgtctcaactagatgttcaaataggaaaaaccagtcatctgccagcttatgaagagttatccttacgacgtaaatttgagattctaacatattttgaccaaattcgaaatgaacgttccaaagtcccaagttttagacgaggtgattttgacacagagatggaaatgacaccagtctttgatggcgaggaattacttacttatctcgaagctgatggcagtccctatgagctgaaacgaacgctgactacagtcgaagaaaaggaattagaaaaaattggacaagccattaggatagaaaatcaagaaaaattgactcagctagggattgatttatctcagtttgacccagaccgagtcggtattttattggatgcagcaggtcgttttcgtttaaaaaatgcagaccttgctttactaggtggttatcccaaagcctcggtaactcaactagcccttgcgacagaactactccaaatgggactaagtcatgaaaaggttgaatttttctttggtagccagctttccattgaagagctgcgacaagttgcctacgcctttttataccaagaactcagcagagaagatgcggagcaatttgaaaaagataaaggtaatcagccagatttaactctcagagattggaaaagcaagctagagaaagctgagggaaaagaagtagttgatgaagaattcgcggaaaatccactggttcagagagtattggacacttatcctctggggtcattggtttcctataagggacaggactttgaggtcatgtcggtcagcgatgctcgattgaacggtttgattcggattgagttagtcaatgacttttcggatatcattgaacaaaatccagttctttatgtgaggacctgggaagaagtcagtcaggcacttcatcagccaaaggcagaaccacaaacagagttagaagaagcggaccaagaattaaacctattctcatttctggaagaggagccagttcagagtattggactattggaaccagatgattcagaaaatggtcataacgatactgatcttgaagaaacagataatcaaattcctgaagaggaagtcgtcgaaacaattccagagattccagtaacggacttttattttccagaagatttgacggacttttatcctaagactgctagagataaggttgagacaaacattgtggccattcgtttggtaaaaaatctagaagtagagcaccgcaatgcttcaccaagtgaacaagaactccttgccaagtatgtaggctggggtggactagccaatgaattttttgatgactataatccaaaattttctaaggaacgagaagaactgaagagcctagtcacagataaagagtattcggatatgaaacagtcctccctgacagcctattacacagacccatccctgatccgtcagatgtgggataagttggaaagagatggctttacaggtggcaaaatcctagatccttccatgggaacagggaatttctttgcggctatgccaaaacacttaagagaaaagagtgagttgtatggcgtagagttagatactattacaggagctattgccaaacaccttcatcccaatagtcatattgaaattaagggatttgagacggtggcttttaacgacaatagttttgatttggtgatttcaaatgtgccctttgccaatatacgaattgcggataataggtacgataggccttacatgattcatgactactttgtcaaaaagtcacttgatttgcttcatgatggtggacaagtagcgattatctcttccacaggaactatggataagcgaacagaaaacatcttacaagatattcgtgagacaactgaatttcttggtggggttcgactgcctgactctgcctttaaggccattgcaggaacgagtgtcacaacggatatgttattcttccagaaacacttagacaagggatatgtggcagacgatttagccttttcaggttccattcgctatgacaaggatagtcgcatttggctcaatccttattttgatggagaatacaatagccaggtgctaggaacctacgaggtcaggaattttaacggaggaacactttctgttaaggggactagtgatgacttgattgcaagtgttgaaacagctctaaatcacgttaaggccccaagagagattgatagaaatgaggtcatcattaacccagatgtgttgaccaaacaagtcaatgatacctccattccagctgaaatgagggaaaatctaggtcagtacagttttggttatcaggggtctacagtttactatcgagataacaaaggcattcgagtcggaaccaagacggaagaaatcagttactatgtcgatgaagagggcaacttcaaagcatgggacaccaaacattctcaaaagcagattgatcgctttaatgccttagaagtgactgataacactgctctggatgtctatgtgaccgatgatgcagccaaacgtggtcagtttaaggggtattataaaaagacagttttctatgaagctccattgtcttataaagaagtggcacgtatcaaaggaatggtcgatattcgcaatgcctaccaagaagttattgccattcaacgctattatgactatgataaggagacctttaaccacttgttaggcaaactcaatcgtacctatgatagctttgtcaaacactatgggtatttgaatagtgctgtgaaccgcaatctttttgatagtgatgataagtattcgcttcttgctagtttggaagatgaaagtctggatccaagtggaaagtctgttatctatactaaatcccttgcctttgagaaggctctagtgcgtcctgaaaaagaggttaaaaaggtgcatactgcccttgatgccttaaattcgagcttggctgacggacgaggtgttgatttcgcttatatgatgtctatctatcaggttgaatcgcagatgaccttgattgaggagttaggcgacctcattatgcctgatcctgagaagtatttgaatggagaattgacctatgtttctcgccaagactttctttcaggggatgtcgtcactaagttagaagtggtagatctattcgtcaaacaagacaatcaggactttaactggtcacattatgcgggacttctagaagctatcaaaccagcccgtattactttggcagacattgattatcgaatcggttcacgctggattcctctggctgtttatggaaaatttgcccaagaaacctttatggggaaagcctatgaactgtcagaccaagaagtagcgacagtcctagaagtcagtcccattgacggggttatcacttaccaatctaagtttgcctacacctattccaacgcaacggataggagtttaggtgtccctgcttcacgctatgatagtggtcgaaaaatctttgaaaatctcctgaattccaatcaaccaaccatcacaaaacaagttgtcgaaggggataagaaaaagaatgtgacggatgtagagaaaacaacggtcctgcgtgccaaggaaacacacctacaagaactctttcaaggttttgtagcaaagtatccagaagtccaacaaatgattgaagacacctataataggctctacaatcgtacggtatcaaagtcctatgatggtagtcatttaaccattgatggacttgctcagaatatctccttacgtcctcaccaaaagaatgccattcaacgaattgtcgaggaaaaacgtgctctactagctcatgaagttggttcaggtaaaacacttaccatgcttggggcaggattcaaactgaaagaactcggaatggtacataaaccactttatgtggtgccgtctagtctgactgctcagtttggtcaagaaatcatgaaatttttccctaccaagaaagtctatgtgactactaagaaagactttgccaaagccaaacgcaagcagtttgtgtcccgtattattacaggggactatgatgccattgtcattggggattcacaatttgagaagataccgatgagtcgtgaaaaacaggtcacctatatcaatgacaaacttgagcaactccgagaaatcaagctaggaagtgacagtgattacacggtgaaagaagcggaacgttcgattaagggattagaacaccagttggaagaactccaaaaactagagcgagatacctttattgagtttgaaaaccttggaattgattttctttttgtggatgaggctcatcacttcaagaatatccgtccaatcactggacttgggaatgtagctggaatcaccaacacaacttctaaaaagaacgtggatatggagatgaaggtgagacaagtacaggcagagcatggagatagaaatgtcgtttttgcgacaggaacaccagtttctaactctattagtgaacttttcaccatgatggattacattcaacctgatgtcttggaacgatacctggtatcaaattttgactcctgggttggggcttttgggaatatcgaaaactccatggaactagccccgacaggagataagtaccaacccaagaaacggttcaagaaatttgtcaaccttcctgaactcatgcgaatctacaaggaaactgccgatattcagacctcagacatgcttgatttaccagtaccggaagctaagattattgcggtggaaagcgagttaacgcaagctcagaaatactatttggaagagctggtaaagcgttcagacgctatcaagtcaggtagtgttgatccaagtagagataacatgcttaaaatcacaggagaagccagaaaactagctattgatatgcggttgattgaccctacttactccttatcggataatcagaaaatccttcaagtagtcgataatgtcgagcggatttaccgtgatggagctggagacaaagccactcagatgattttctcagatattggaacccctaaaagtaaggaagaagggtttgatgtctacaatgaacttaaggacttgtttgtcgatcgagggataccaaaagaagaaattgcctttgtccatgatgccaatactgatgagaagaaaaactctctgtcacgcaaggtcaatagtggagaagtacggattctcatggcttctacggaaaaagggggaacaggattaaacgtccaatctcgcatgaaagctgtccactatttagacgttccctggaggccctcagacattgtccagcgaaatggacgactaattcgacaaggaaacatgcaccaggaggtagatatttatcactatattactaaagggagctttgacaattacctctggcagacgcaggagaataagctaaagtatatcacccagataatgacctcaaaagatcctgtgagatcagctgaagacattgatgaacaaaccatgaccgcctcagactttaaggcattggcaactgggaacccttatctcaaactcaaaatggagttggaaaatgaactgacagttttagagaatcaaaaacgagcctttaatcgctccaaagacgagtatcgccataccatttcctatagcgagaagcacctccctattatggaaaaacggttgagtcaatatgataaagatattgcccaatctttggcaaccaagtcgcaagattttgtcatgcgatttgacaatcaagcaatggataatcgtgctgaagctggggactatctgcgaaaactcattacctataaccgctcagagaccaaggaagtcaggacacttgccagctttagaggatttgatttaaaaatgactacacgaggtgctagtgagcccttaccagaaaccatttctttaatgattgtaggtgataaccagtatactgtcgcccttgatttgaaatcagacgtgggaaccattcaacggattagtaatgccattgaccatattatagatgaccaagaaaagacgcaagagctggtaaaggatttaaaagataagctacgagtagccaaagtagaagttgataaagtctttccaaaggaagaggactatcagcttgtaaaggctaagtatgatgttttagctcccttggttgaaaaagaagcagagattgaagagatagatgcagctttggccaagtttagtgaagatacaacaccccaaaagaagcaacaaatagcactcgagata

SEQ ID NO: 9930 - protein, 2274 aa, Streptococcus agalactiae
MNQEVLLQMMRATIPRDRALLEAFLYYQAEHFDEEWDSLIHQFMTNRQEINKSVQVLHFETDVSAFVQASPYDTAHDLLTYTQVFGQSGLQKLDKLSPSEKNLVIEVALFNLATRFQLLDSNGHYQTISPDSLLQKSRGANLVNVYRVANNLADRISRDIEQFLLTYEPELETRADETVLENEETVDEHKTSVHQAISFREEGSLVIASLDVDLSQLDVQIGKTSHLPAYEELSLRRKFEILTYFDQIRNERSKVPSFRRGDFDTEMEMTPVFDGEELLTYLEADGSPYELKRTLTTVEEKELEKIGQAIRIENQEKLTQLGIDLSQFDPDRVGILLDAAGRFRLKNADLALLGGYPKASVTQLALATELLQMGLSHEKVEFFFGSQLSIEELRQVAYAFLYQELSREDAEQFEKDKGNQPDLTLRDWKSKLEKAEGKEVVDEEFAENPLVQRVLDTYPLGSLVSYKGQDFEVMSVSDARLNGLIRIELVNDFSDIIEQNPVLYVRTWEEVSQALHQPKAEPQTELEEADQELNLFSFLEEEPVQSIGLLEPDDSENGHNDTDLEETDNQIPEEEVVETIPEIPVTDFYFPEDLTDFYPKTARDKVETNIVAIRLVKNLEVEHRNASPSEQELLAKYVGWGGLANEFFDDYNPKFSKEREELKSLVTDKEYSDMKQSSLTAYYTDPSLIRQMWDKLERDGFTGGKILDPSMGTGNFFAAMPKHLREKSELYGVELDTITGAIAKHLHPNSHIEIKGFETVAFNDNSFDLVISNVPFANIRIADNRYDRPYMIHDYFVKKSLDLLHDGGQVAIISSTGTMDKRTENILQDIRETTEFLGGVRLPDSAFKAIAGTSVTTDMLFFQKHLDKGYVADDLAFSGSIRYDKDSRIWLNPYFDGEYNSQVLGTYEVRNFNGGTLSVKGTSDDLIASVETALNHVKAPREIDRNEVIINPDVLTKQVNDTSIPAEMRENLGQYSFGYQGSTVYYRDNKGIRVGTKTEEISYYVDEEGNFKAWDTKHSQKQIDRFNALEVTDNTALDVYVTDDAAKRGQFKGYYKKTVFYEAPLSYKEVARIKGMVDIRNAYQEVIAIQRYYDYDKETFNHLLGKLNRTYDSFVKHYGYLNSAVNRNLFDSDDKYSLLASLEDESLDPSGKSVIYTKSLAFEKALVRPEKEVKKVHTALDALNSSLADGRGVDFAYMMSIYQVESQMTLIEELGDLIMPDPEKYLNGELTYVSRQDFLSGDVVTKLEVVDLFVKQDNQDFNWSHYAGLLEAIKPARITLADIDYRIGSRWIPLAVYGKFAQETFMGKAYELSDQEVATVLEVSPIDGVITYQSKFAYTYSNATDRSLGVPASRYDSGRKIFENLLNSNQPTITKQVVEGDKKKNVTDVEKTTVLRAKETHLQELFQGFVAKYPEVQQMIEDTYNRLYNRTVSKSYDGSHLTIDGLAQNISLRPHQKNAIQRIVEEKRALLAHEVGSGKTLTMLGAGFKLKELGMVHKPLYVVPSSLTAQFGQEIMKFFPTKKVYVTTKKDFAKAKRKQFVSRIITGDYDAIVIGDSQFEKIPMSREKQVTYINDKLEQLREIKLGSDSDYTVKEAERSIKGLEHQLEELQKLERDTFIEFENLGIDFLFVDEAHHFKNIRPITGLGNVAGITNTTSKKNVDMEMKVRQVQAEHGDRNVVFATGTPVSNSISELFTMMDYIQPDVLERYLVSNFDSWVGAFGNIENSMELAPTGDKYQPKKRFKKFVNLPELMRIYKETADIQTSDMLDLPVPEAKIIAVESELTQAQKYYLEELVKRSDAIKSGSVDPSRDNMLKITGEARKLAIDMRLIDPTYSLSDNQKILQVVDNVERIYRDGAGDKATQMIFSDIGTPKSKEEGFDVYNELKDLFVDRGIPKEEIAFVHDANTDEKKNSLSRKVNSGEVRILMASTEKGGTGLNVQSRMKAVHYLDVPWRPSDIVQRNGRLIRQGNMHQEVDIYHYITKGSFDNYLWQTQENKLKYITQIMTSKDPVRSAEDIDEQTMTASDFKALATGNPYLKLKMELENELTVLENQKRAFNRSKDEYRHTISYSEKHLPIMEKRLSQYDKDIAQSLATKSQDFVMRFDNQAMDNRAEAGDYLRKLITYNRSETKEVRTLASFRGFDLKMTTRGASEPLPETISLMIVGDNQYTVALDLKSDVGTIQRISNAIDHIIDDQEKTQELVKDLKDKLRVAKVEVDKVFPKEEDYQLVKAKYDVLAPLVEKEAEIEEIDAALAKFSEDTTPQKKQQIALEI

SEQ ID NO: 9931 - DNA, 588 bp, Streptococcus agalactiae
atgtcaaaaaaagagattctactcgattttatagaaaagaacaatggcattgtcacaaacaaagattgtaaagcactaggtattccaacaatatatctgacaagactagagaaagaaggcattatcttccgagttgaaaaaggtattttcctaacccaaaacggagactatgatgaatactacttctttcaatatcgttttcctaaggctattttctcttatatttcggcactgtatctacaacagtttacagatgaaattccacaatattttgatgtgacagttcctagaggctaccgctttaatactcctccagctaatctaaacattcactttgtctctaaagaatacagcgagctgggaatgactactgtacctactcctatgggaaacaacgtaagggtatatgattttgaacgtattatttgtgattttgtaatacatcgagaaaagattgattccgaactctttgtcaagacacttcaatcttatgggaactatcctaaaaaaaatctagcaaaactctatgaatatgcgacaaaaatgaatactttagaaaaagttaaacaaactctggaggttctaata

SEQ ID NO: 9932 - protein, 196 aa, Streptococcus agalactiae
MSKKEILLDFIEKNNGIVTNKDCKALGIPTIYLTRLEKEGIIFRVEKGIFLTQNGDYDEYYFFQYRFPKAIFSYISALYLQQFTDEIPQYFDVTVPRGYRFNTPPANLNIHFVSKEYSELGMTTVPTPMGNNVRVYDFERIICDFVIHREKIDSELFVKTLQSYGNYPKKNLAKLYEYATKMNTLEKVKQTLEVLI

SEQ ID NO: 9933 - DNA, 240 bp, Streptococcus agalactiae
atgaatcaaaaactaacaggctttgtttacggagtggacgccagctccatgttctcccaggccatgtctctattacaaaaaggcttgattgcagtaggagcctttcttgtagtcatgggcattatcaacctttcaaccaacattaaagatggtgggccaggcgtccgaaatgccattttagaaattgttggtggtgtcatggtgggagccgcaggtgcttttgtgacacagattaccatt

SEQ ID NO: 9934 - protein, 80 aa, Streptococcus agalactiae
MNQKLTGFVYGVDASSMFSQAMSLLQKGLIAVGAFLVVMGIINLSTNIKDGGPGVRNAILEIVGGVMVGAAGAFVTQITI

SEQ ID NO: 9935 - DNA, 486 bp, Streptococcus agalactiae
atgtcatctgaacaacaagaacgtcaagcgatgcaatacgtagaaagaagtagtttattgacagtcagaaccctcttaaaactcttagaatggtcggctaggcaagccttagctcaagattcagcttataagattggggttcaaaaaatggaagaactccttcaaagtccttacgccattgaagcgattgatgttagtaaagacatactggataagccaatcgatgtggagaaatttaaggagttgatggagtcagaaaaactgccaatcgcaattagttggcaaaaagactatctctacttttatgccaaggataagaccttgctcgatcatcacttggatgaattgttgaagaaactgatgtctaatccagagaagctagaaggtttaacctttgataaaaccttggaccaagagatagaactggccaaagagaaaattagagtgacagaactttcggcagtaaaaaccaaggaggtgaccttg

SEQ ID NO: 9936 - protein, 162 aa, Streptococcus agalactiae
MSSEQQERQAMQYVERSSLLTVRTLLKLLEWSARQALAQDSAYKIGVQKMEELLQSPYAIEAIDVSKDILDKPIDVEKFKELMESEKLPIAISWQKDYLYFYAKDKTLLDHHLDELLKKLMSNPEKLEGLTFDKTLDQEIELAKEKIRVTELSAVKTKEVTL

SEQ ID NO: 9937 - DNA, 582 bp, Streptococcus agalactiae
atgataaggatagtgttgttttatctagccatacagcttaacggtcttctggtgagtttattcctgaaagagtatctgacaatagagggtatagtcttgctacaattggtcctattaagtgtgacttgcttagagattgcccgtcataaaactgttccattaaaaattgtgggcgtacaaaatcgcctaagttggttgcttcttggctttgtggctatggttgcttttgcagtcttcatcagtttcctatttccagttcagactaggaatcaagcagtattggtacaagtaggaaaacaggttcctcctattatctttttattgtttctggtcaatgcaagtattcttgaagagattgtttacaggcaattgctgtgggaaaaattgacattcccttttgaacaaataggcgtgaccagttttctctttgttctatcccatggacctaatcagttagggagttggctcatctatagctgtcttggcttgaccttggctgttgttcgattgaaaactgattgtatgacggcaatcgccttacatttactttggaatagtttggcttatgtcgtaactttcttg

SEQ ID NO: 9938 - protein, 194 aa, Streptococcus agalactiae
MIRIVLFYLAIQLNGLLVSLFLKEYLTIEGIVLLQLVLLSVTCLEIARHKTVPLKIVGVQNRLSWLLLGFVAMVAFAVFISFLFPVQTRNQAVLVQVGKQVPPIIFLLFLVNASILEEIVYRQLLWEKLTFPFEQIGVTSFLFVLSHGPNQLGSWLIYSCLGLTLAVVRLKTDCMTAIALHLLWNSLAYVVTFL

SEQ ID NO: 9939 - DNA, 231 bp, Streptococcus agalactiae
atgaatgaacgattttgggacaatttagaaatcattctggctgaaaaagacctcacttgggcagaactagctcgcaaagtattcaacggtcaatatgtttatccaagtgaatttaatcgcctctatcaaaaattacggcattacaaatctaatcgtctgatgccacaaataagatgggttgagcgtattgttctagtcttagatattgattatgaagatttatttaagagg

SEQ ID NO: 9940 - protein, 77 aa, Streptococcus agalactiae
MNERFWDNLEIILAEKDLTWAELARKVFNGQYVYPSEFNRLYQKLRHYKSNRLMPQIRWVERIVLVLDIDYEDLFKR

SEQ ID NO: 9941 - DNA, 93 bp, Streptococcus agalactiae
atgatttggtggatactaggtggaatctatctgatttctatcatcattttgattgttgaaatcatccgtgcaccagaaatggatgatcatata

SEQ ID NO: 9942 - protein, 31 aa, Streptococcus agalactiae
MIWWILGGIYLISIIILIVEIIRAPEMDDHI

SEQ ID NO: 9943 - DNA, 363 bp, Streptococcus agalactiae
atggcattaaacattgaaaatattattgctgaaattaaagaagctacaattcttgaacttaacgatcttgtaaaagctatcgaagaagaatttggtgtaactgctgctgctcctgtagctgctgccgctgctggtggtgaagctgctgctgctaaagactcatttgacgttgaattaacagctgctggagacaaaaaagttggcgttatcaaagttgttcgtgaaatcacaggcgaaggtcttaaagaagctaaagctatcgttgataacgcaccatcagttatcaaagaaggtgcttcagaagcagaagctaacgaaatcaaagaaaaacttgaagctgcaggtgcttcagttactcttaaa

SEQ ID NO: 9944 - protein, 121 aa, Streptococcus agalactiae
MALNIENIIAEIKEATILELNDLVKAIEEEFGVTAAAPVAAAAAGGEAAAAKDSFDVELTAAGDKKVGVIKVVREITGEGLKEAKAIVDNAPSVIKEGASEAEANEIKEKLEAAGASVTLK

SEQ ID NO: 9945 - DNA, 1023 bp, Streptococcus agalactiae
gtgctgggctttacttcggtgttccatttattattttctgctatatttatcacaaactacgttacaagaaatggtgatcttatgggaagatttaaagaacttttagagagtaaaaaaactctcatcctacatggtgccttggggaccgagcttgagagtagaggttgtgatgtttctgggaaactttggtcagccaaatatctgattgaggatccagcagctattcagaccattcatgaagattatattcgtgctggcgctgatattgtgacgacatcaacttatcaggcgactttacaaggactagctcaagttggtgtctctgaaagtcagacagaagatttgattcgcttgactgttcagttggcaaaagctgcgcgtgagcaagtttggaaaagtttgacaaaagaagaaaaatcagagagaatctatcctttgatttctggggatgttggtccctacgctgcctttttagcggatggctctgagtacactggactctacgatattgataagcaaggtcttaaaaacttccatcgccatcgtattgagcttcttttagatgagggtgttgacattctggcacttgaaaccattccaaacgctcaggaggctgaggctcttattgagctacttgccgaggatttccctcaggttgaggcttatatgtcattcacctctcaagatggtaagaccatctcagatggtagtgctgttgcagacttggcgaaagctattgatgttagcccacaggtcgtggcgctgggcattaactgttcaagtccatcgttagttgctgatttcttgcaagcaatagcagagcagactaacaagcctcttgtgacctatccaaactctggagaggtttatgatggggcaagccaatcttggcaatctagccctgatcattcacacaccctacttgaaaatacaagtgactggcaaaaacttggcgcccaagttgtcggaggttgttgccgaactagaccagctgatattgctgacctctctgcacatttaaaa

SEQ ID NO: 9946 - protein, 341 aa, Streptococcus agalactiae
MLGFTSVFHLLFSAIFITNYVTRNGDLMGRFKELLESKKTLILHGALGTELESRGCDVSGKLWSAKYLIEDPAAIQTIHEDYIRAGADIVTTSTYQATLQGLAQVGVSESQTEDLIRLTVQLAKAAREQVWKSLTKEEKSERIYPLISGDVGPYAAFLADGSEYTGLYDIDKQGLKNFHRHRIELLLDEGVDILALETIPNAQEAEALIELLAEDFPQVEAYMSFTSQDGKTISDGSAVADLAKAIDVSPQVVALGINCSSPSLVADFLQAIAEQTNKPLVTYPNSGEVYDGASQSWQSSPDHSHTLLENTSDWQKLGAQVVGGCCRTRPADIADLSAHLK

SEQ ID NO: 9947 - DNA, 1224 bp, Streptococcus agalactiae
atggctgggaatcgtaataacgatatgaatgtctattgttcattttgtggcaaaagccaagatgaagtaaaaaaaattattgcaggtaatggtgttttcatttgtaatgaatgtgtggccttatcacaagaaattattaaggaagaattagctgaggaagtactggctgatttagcagaagtaccaaaacctaaggaactattagaaatattaaatcaatatgttgtagggcaagatcgtgctaaacgtgctttagcagttgctgtctacaatcattacaagcgtgttagttataccgagagtagtgacgatgatgtagatttgcaaaaatccaacattttgatgattggtccaactggctcaggaaaaaccttcttagcacaaacactggctaaaagccttaatgtaccgtttgctattgcagatgcgacttcattgaccgaagcaggatacgttggagaagatgttgagaatattcttcttaaattgattcaagctgctgattataatgtcgaacgtgctgagcgtggtattatctacgttgatgaaatagataaaattgctaagaaaggcgaaaatgtttctatcacacgtgatgtgtctggtgaaggtgtacagcaagcccttcttaaaattattgagggtacggtagcaagtgttcccccacagggtgggcgtaaacatcctaaccaagaaatgattcaaattaataccaagaacatcctttttattgtcggtggtgcttttgatggtattgaagaccttgtgaagcaacgtttaggcgaaaaagttattggttttggacagacaagccgtaaaattgatgacaacgcttcttatatgcaagagataatttctgaggatattcaaaagtttggactgattccagagtttattggccgtttaccagtagttgcagcgttagaacttcttactgcagaagatctggttcgtattctgacagaaccacgcaatgctttggttaaacaataccaaaccttattatcttatgatggtgtagaattggaatttgaccaggatgctctattggctatcgctgataaggctatcgagcgcaagactggtgcacgtggtttacgttctattattgaagaaacgatgcttgatatcatgtttgaaattccaagccaagaagatgtaacaaaagttcgtatcacaaaggctgctgttgagggtactgacaagcctgttttagagacggct

SEQ ID NO: 9948 - protein, 408 aa, Streptococcus agalactiae
MAGNRNNDMNVYCSFCGKSQDEVKKIIAGNGVFICNECVALSQEIIKEELAEEVLADLAEVPKPKELLEILNQYVVGQDRAKRALAVAVYNHYKRVSYTESSDDDVDLQKSNILMIGPTGSGKTFLAQTLAKSLNVPFAIADATSLTEAGYVGEDVENILLKLIQAADYNVERAERGIIYVDEIDKIAKKGENVSITRDVSGEGVQQALLKIIEGTVASVPPQGGRKHPNQEMIQINTKNILFIVGGAFDGIEDLVKQRLGEKVIGFGQTSRKIDDNASYMQEIISEDIQKFGLIPEFIGRLPVVAALELLTAEDLVRILTEPRNALVKQYQTLLSYDGVELEFDQDALLAIADKAIERKTGARGLRSIIEETMLDIMFEIPSQEDVTKVRITKAAVEGTDKPVLETA

SEQ ID NO: 9949 - DNA, 492 bp, Streptococcus agalactiae
atgacaaagcaaataattgccatttgggctgaagatgaagaccatttgattggagttaatggcggtttaccatggaggcttcctaaagagttacatcacttcaaagaaacgaccatggggcaggctttgcttatgggacgaaagacctttgatggaatgaaccgtcgtgttttacctggtagagagacaatcatcttaacaaaagatgaacaattccaagcagatggagtgacagtcctaaatagtgttgaacaagttataaaatggtttcaggaacataataagaccttatttattgtaggtggtgcaagtatttataaagcatttctgccttattgtgaagcaatcataaaaactaaagttcatggaaaatttaaaggtgatacctattttcctgatgttaatctatctgagtttaaagttatctctagagattattttgaaaaggatgagcagaatgctcatgcttttactgtgacatattttgaaaaa

SEQ ID NO: 9950 - protein, 164 aa, Streptococcus agalactiae
MTKQIIAIWAEDEDHLIGVNGGLPWRLPKELHHFKETTMGQALLMGRKTFDGMNRRVLPGRETIILTKDEQFQADGVTVLNSVEQVIKWFQEHNKTLFIVGGASIYKAFLPYCEAIIKTKVHGKFKGDTYFPDVNLSEFKVISRDYFEKDEQNAHAFTVTYFEK

SEQ ID NO: 9951 - DNA, 561 bp, Streptococcus agalactiae
atgctaatcctattaccaatcaccgctgtctatagtcacaaccacttcggattacaagcagcacttggtacctcaatattcgtcacttctttatttttgatgtttttatcatcaagtatttaccactccatgacttataacagtcttcaaaaatatgttctacgcatgattgatcactctatgatttatattgctattgcaggtagttatactcctgtcgcattgtcacttattggcggctggttaggatatctcatcatttttttacaatgggggattacattatttggtatcctttataaaatcttcgctcccaaaatcaatgataaatttagccttgtactttacctcattatgggatggctggttatctttattttccctgctattatcacaaaaactggaccagctttttggggattactcttggctggtggtatttgctatactatcggtgcactcttttatgctcgcaaacgtccttatgatcacatgatttggcacctttttattctattagcttctattttacaatacattggaattgtctacttcatgcta

SEQ ID NO: 9952 - protein, 187 aa, Streptococcus agalactiae
MLILLPITAVYSHNHFGLQAALGTSIFVTSLFLMFLSSSIYHSMTYNSLQKYVLRMIDHSMIYIAIAGSYTPVALSLIGGWLGYLIIFLQWGITLFGILYKIFAPKINDKFSLVLYLIMGWLVIFIFPAIITKTGPAFWGLLLAGGICYTIGALFYARKRPYDHMIWHLFILLASILQYIGIVYFML

SEQ ID NO: 9953 - DNA, 438 bp, Streptococcus agalactiae
atggagaatcctcttcaaaaagcacgaatacttgttaatcaacttgaaaagtatttagatcattatgcaaaagaatatgatgttgaacatttagcgggtccacaaggacacctagtgatgtatctctataaacatcctgataaggatatgtctataaaagctgttgaagaaatcttacacatttctaagtctgtagcttctaatttggtaaaacggatggaaaaaaatggttttattgcgattgtaccatctaagacagataagcgtgtaaaatatctttatttgactcacttaggtaaaaaaaaggctacacaatttgaaattttcttagaaaaattgcatagtactatgttagcaggtattactaaagaagagattcgtaccaccaaaaaggttattaggacattagctaaaaatatggcaatggaaaatcttgat

SEQ ID NO: 9954 - protein, 146 aa, Streptococcus agalactiae
MENPLQKARILVNQLEKYLDHYAKEYDVEHLAGPQGHLVMYLYKHPDKDMSIKAVEEILHISKSVASNLVKRMEKNGFIAIVPSKTDKRVKYLYLTHLGKKKATQFEIFLEKLHSTMLAGITKEEIRTTKKVIRTLAKNMAMENLD

SEQ ID NO: 9955 - DNA, 507 bp, Streptococcus agalactiae
atgaaatggttcccacttgttggaggtataattgccttattagctggcttctatctctttataaatcctgtaacggttgttgcaactctgggttggttcattgctttatttatctttatttatggcatttcaaatttagtacgctacttgcaagctgattcttatcaccgtagcccttggtatctggttcagagtatccttgctattatttttggtatcattttactatccagctcagcaatgtcactttcaaatactgtcatgactattttagcatactggctactggtatctggtattttacgacttttgggtggtttccaaatgcaaaaaattaatttcccaggtgccaaatcctataaacgttcggcttatattgcactcattttaggtattattttactggttcaacctaccttatcagcagccatcattggaagatttgtagcctttatattaatagcaattggagcttcggctatttacacttttactcgtattaattat

SEQ ID NO: 9956 - protein, 169 aa, Streptococcus agalactiae
MKWFPLVGGIIALLAGFYLFINPVTVVATLGWFIALFIFIYGISNLVRYLQADSYHRSPWYLVQSILAIIFGIILLSSSAMSLSNTVMTILAYWLLVSGILRLLGGFQMQKINFPGAKSYKRSAYIALILGIILLVQPTLSAAIIGRFVAFILIAIGASAIYTFTRINY

SEQ ID NO: 9957 - DNA, 1206 bp, Streptococcus agalactiae
atgagattaaattatttgccttctgagtttcagaaggctttaccaatattaaaaaagataaaaaaagccggttatgaagcatactttgtaggtggtagtgttcgggatgttttacttgaccgtccaattcatgatgttgatatagcaacgtcatcttatccagaagaaacaaagcagatttttaaaaggacagttgatgttggtattgaacatggaacagtcttagtattggaaaaaggtggtgaatatgagattaccacttttaggactgaggaggtttatgttgattataggcgtccgagtcaggtcaattttgttaggtcgctagaagaagatctaaaacgtcgagatttcacagttaatgcctttgctttaaatgaagatggagaagttattgatctctttcatggattggatgatttagataatcaccttcttagagcagtaggactcgccagtgagcgttttaatgaagatgctcttcgaattatgcgtggtttgcgtttttctgctagtctaaattttgatatcgaaacaacaacttttgaggcaatgaaaaagcacgcgtcattattggagaaaatatctgttgagcgttcttttattgaatttgataaacttctattagcaccttattggcgtaaaggaatgctggcactaatagatagtcatgcttttaattatctaccatgcttaaaaaatagggaattacaattaagcgcctttttgtcccagttagataaagattttttatttgagacatcagaacaagcttgggcatcactcatcttgagtatggaagttgaacacacaaagacttttttaaaaaaatggaagacatcaactcactttcaaaaagatgttgagcatatagtggatgtttatcgtattcgtgaacaaatgggattgactaaagaacatctttatcgttatggaaaaactataataaaacaagcggaaggtattcgcaaagcaagaggcttgatggttgatttcgaaaaaatagaacaactagatagtgagttagcaatccatgataggcatgagatagttgtcaatggtggcaccttaatcaagaaattaggaataaaacctggtccacagatgggagatattatctctcaaattgaattagccattgttttaggacaactgattaatgaagaagaggctattttacattttgttaagcagtacttgatggat

SEQ ID NO: 9958 - protein, 402 aa, Streptococcus agalactiae
MRLNYLPSEFQKALPILKKIKKAGYEAYFVGGSVRDVLLDRPIHDVDIATSSYPEETKQIFKRTVDVGIEHGTVLVLEKGGEYEITTFRTEEVYVDYRRPSQVNFVRSLEEDLKRRDFTVNAFALNEDGEVIDLFHGLDDLDNHLLRAVGLASERFNEDALRIMRGLRFSASLNFDIETTTFEAMKKHASLLEKISVERSFIEFDKLLLAPYWRKGMLALIDSHAFNYLPCLKNRELQLSAFLSQLDKDFLFETSEQAWASLILSMEVEHTKTFLKKWKTSTHFQKDVEHIVDVYRIREQMGLTKEHLYRYGKTIIKQAEGIRKARGLMVDFEKIEQLDSELAIHDRHEIVVNGGTLIKKLGIKPGPQMGDIISQIELAIVLGQLINEEEAILHFVKQYLMD

SEQ ID NO: 9959 - DNA, 1923 bp, Streptococcus agalactiae
atggatttaaaagcaaccagtaaagaggctgcaattgatgaaatgattacaaaattagttgacacaggtgttgtgacaaactttgctatttttaaagatggtatcatgaagcgtgaggcacaaacatcaactggattaggtgatggtatcgctatgccacatagtaaaaatgctgccgttaaagaagctactgtcctttttgcaaaatctgcatcaggtgttgattacgaagcacttgatggacagccaactgatttattctttatgattgctgcgccagatggtgctaatgatacgcatttagctgccttggcagaactatctaaatatcttttaaaagaagggttcgctgatcaattacgtcaagcaaaaacgccagatgacattattgctacttttgatagtaatagcatttctcaagaaacagtagctccacaaacagtacaatcaacaagtaaaggttcagattatattgttgcagtaacagcttgcactacgggaattgcccacacgtatatggcagaagaagctttaaagaaaaaagcagctgaaatgggtgtaggtattaaagttgaaacaaatggcgcttctggtgtaggaaataagttgacttcaagtgatattgcaagggctaagggtgttattattgcagcagataaggctgtagagatggatcgttttgatggcaaacctttggtatcacgtccggtagctgatggtattaaaaaaagtgaagacttaattaacattattctcgataataaggcacaaacctatcatgcaaaaaatcaaaatgataaacaatcaggtgaatctgatggaaaatcaggcttaggctctgctttttataaacaccttatgggtggtgtatcacaaatgttaccattcgttattggtggtggtattatgattgcgattgctttcctttttgataacatacttggtgtaccaaaagaccaattaagtaatttaggttcataccatgaaattgcagccttattcaaaaatatcggtggcgcagcatttgcatttatgttaccagtattggcaggttatatcgcttattcaatagctgaaaaaccaggactagtagctggcttcgtagctggttcaattgcatcaagtggactggcattcggtaaagtaccttttgcagaaggtgggaaagcaaccttagcattagcaggtgtgccatcaggtttcttaggggctttagtaggtggtttcttagctggtggagttatcctactacttagaaaattactttcaggtctcccaaaatcgcttgaaggtattaaatcaattcttctatacccattgttaggtgttttgattacaggtttcttgatgttgctcgtaaacattccaatggcagctatcaacacagctcttaacactttcttacaaggtttatctggtagttcagcagtcttgatgggcttactagttggtggtatgatggctgtagatatgggtgggcctgttaataaagcagcttatgtttttggtacaggtactcttgcagcaactgttgcaaatggcggctctgttgttatggcagctgtaatggctggaggaatggttccaccgttagcagtatttgtggcaactttattatttaaagataaatttaataatgaagaacgtcaatctggtctaacaaatatcgttatggggttatcttttatcactgaaggtgctattccgtttggtgctgctgacccagctcgtgcaatccctagctttattgtaggttcagccttaactggagcacttgttggtttagctggtatcaagttgatggctcctcatggagggatttttgtcatcgcattaacaagtaatcctttactttatattctatttattctaattggagcggtagtctcaggtgtactctttggcttgttccgtaaaataaaa

SEQ ID NO: 9960 - protein, 641 aa, Streptococcus agalactiae
MDLKATSKEAAIDEMITKLVDTGVVTNFAIFKDGIMKREAQTSTGLGDGIAMPHSKNAAVKEATVLFAKSASGVDYEALDGQPTDLFFMIAAPDGANDTHLAALAELSKYLLKEGFADQLRQAKTPDDIIATFDSNSISQETVAPQTVQSTSKGSDYIVAVTACTTGIAHTYMAEEALKKKAAEMGVGIKVETNGASGVGNKLTSSDIARAKGVIIAADKAVEMDRFDGKPLVSRPVADGIKKSEDLINIILDNKAQTYHAKNQNDKQSGESDGKSGLGSAFYKHLMGGVSQMLPFVIGGGIMIAIAFLFDNILGVPKDQLSNLGSYHEIAALFKNIGGAAFAFMLPVLAGYIAYSIAEKPGLVAGFVAGSIASSGLAFGKVPFAEGGKATLALAGVPSGFLGALVGGFLAGGVILLLRKLLSGLPKSLEGIKSILLYPLLGVLITGFLMLLVNIPMAAINTALNTFLQGLSGSSAVLMGLLVGGMMAVDMGGPVNKAAYVFGTGTLAATVANGGSVVMAAVMAGGMVPPLAVFVATLLFKDKFNNEERQSGLTNIVMGLSFITEGAIPFGAADPARAIPSFIVGSALTGALVGLAGIKLMAPHGGIFVIALTSNPLLYILFILIGAVVSGVLFGLFRKIK

SEQ ID NO: 9961 - DNA, 741 bp, Streptococcus agalactiae
atgctaaagtcaaagagaaaagaaattatcttatcacgacttgagcaaaataagagtgttactttagatgaattaacgtctatcttagagacttctgaatctacagttcgcagggatttagatgaacttgaatctgcaggttttttaaaaagggtgcatggtggtgctgaattaccatactcacttggccaggaattaagtaatcaagaaaaagctatcaaaaacgttcaaaaaaaattggatattgctagacaaactgcaaagctgatagcaaagcaagatgttatatttattgatgccggaactacgacagaattattaattgattttctccctcacgagcaattaacggtggtgacgaattctattcatcatgctgcaaagttagttgatagagggataaaaacaatcattatcggaggagcggttaaacattcaacagatgctagtattggccaggtagccattaatcagattaggcagataacggttgacaaagcttttctggggatgaatggtatagatgaagtttatttaactacaccagatttagaagaagctgctattaaagaagctattattaataatagtcaacaaacctttattctaatggattcatctaaaattggacaagttacatttgctaaagtgaaagagataaatgacattaatttagtaactaataagactgattcagaacttatgacaataataaaagagaaaatgaaggtgattcaagta

SEQ ID NO: 9962 - protein, 247 aa, Streptococcus agalactiae
MLKSKRKEIILSRLEQNKSVTLDELTSILETSESTVRRDLDELESAGFLKRVHGGAELPYSLGQELSNQEKAIKNVQKKLDIARQTAKLIAKQDVIFIDAGTTTELLIDFLPHEQLTVVTNSIHHAAKLVDRGIKTIIIGGAVKHSTDASIGQVAINQIRQITVDKAFLGMNGIDEVYLTTPDLEEAAIKEAIINNSQQTFILMDSSKIGQVTFAKVKEINDINLVTNKTDSELMTIIKEKMKVIQV

SEQ ID NO: 9963 - DNA, 1632 bp, Streptococcus agalactiae
atgatgaaaaaaggacaagtaaatgatactaagcaatcttactctctacgtaaatataaatttggtttagcatcagtaattttagggtcattcataatggtcacaagtcctgtttttgcggatcaaactacatcggttcaagttaataatcagacaggcactagtgtggatgctaataattcttccaatgagacaagtgcgtcaagtgtgattacttccaataatgatagtgttcaagcgtctgataaagttgtaaatagtcaaaatacggcaacaaaggacattactactcctttagtagagacaaagccaatggtggaaaaaacattacctgaacaagggaattatgtttatagcaaagaaaccgaggtgaaaaatacaccttcaaaatcagccccagtagctttctatgcaaagaaaggtgataaagttttctatgaccaagtatttaataaagataatgtgaaatggatttcatataagtctttttgtggcgtacgtcgatacgcagctattgagtcactagatccatcaggaggttcagagactaaagcacctactcctgtaacaaattcaggaagcaataatcaagagaaaatagcaacgcaaggaaattatacattttcacataaagtagaagtaaaaaatgaagctaaggtagcgagtccaactcaatttacattggacaaaggagacagaattttttacgaccaaatactaactattgaaggaaatcagtggttatcttataaatcattcaatggtgttcgtcgttttgttttgctaggtaaagcatcttcagtagaaaaaactgaagataaagaaaaagtgtctcctcaaccacaagcccgtattactaaaactggtagactgactatttctaacgaaacaactacaggttttgatattttaattacgaatattaaagatgataacggtatcgctgctgttaaggtaccggtttggactgaacaaggagggcaagatgatattaaatggtatacagctgtaactactggggatggcaactacaaagtagctgtatcatttgctgaccataagaatgagaagggtctttataatattcatttatactaccaagaagctagtgggacacttgtaggtgtaacaggaactaaagtgacagtagctggaactaattcttctcaagaacctattgaaaatggtttagcaaagactggtgtttataatattatcggaagtactgaagtaaaaaatgaagctaaaatatcaagtcagacccaatttactttagaaaaaggtgacaaaataaattatgatcaagtattgacagcagatggttaccagtggatttcttacaaatcttatagtggtgttcgtcgctatattcctgtgaaaaagctaactacaagtagtgaaaaagcgaaagatgaggcgactaaaccgactagttatcccaacttacctaaaacaggtacctatacatttactaaaactgtagatgtgaaaagtcaacctaaagtatcaagtccagtggaatttaattttcaaaagggtgaaaaaatacattatgatcaagtgttagtagtagatggtcatcagtggatttcatacaagagttattccggtattcgtcgctatattgaaatt

SEQ ID NO: 9964 - protein, 544 aa, Streptococcus agalactiae
MMKKGQVNDTKQSYSLRKYKFGLASVILGSFIMVTSPVFADQTTSVQVNNQTGTSVDANNSSNETSASSVITSNNDSVQASDKVVNSQNTATKDITTPLVETKPMVEKTLPEQGNYVYSKETEVKNTPSKSAPVAFYAKKGDKVFYDQVFNKDNVKWISYKSFCGVRRYAAIESLDPSGGSETKAPTPVTNSGSNNQEKIATQGNYTFSHKVEVKNEAKVASPTQFTLDKGDRIFYDQILTIEGNQWLSYKSFNGVRRFVLLGKASSVEKTEDKEKVSPQPQARITKTGRLTISNETTTGFDILITNIKDDNGIAAVKVPVWTEQGGQDDIKWYTAVTTGDGNYKVAVSFADHKNEKGLYNIHLYYQEASGTLVGVTGTKVTVAGTNSSQEPIENGLAKTGVYNIIGSTEVKNEAKISSQTQFTLEKGDKINYDQVLTADGYQWISYKSYSGVRRYIPVKKLTTSSEKAKDEATKPTSYPNLPKTGTYTFTKTVDVKSQPKVSSPVEFNFQKGEKIHYDQVLVVDGHQWISYKSYSGIRRYIEI

SEQ ID NO: 9965 - DNA, 1242 bp, Streptococcus agalactiae
atgagtaaacgacaaaatttaggaattagtaaaaaaggagcaattatatcagggctctcagtggcactaattgtagtaataggtggctttttatgggtacaatctcaacctaataagagtgcagtaaaaactaactacaaagtttttaatgttagagaaggaagtgtttcgtcctcaactcttttgacaggaaaagctaaggctaatcaagaacagtatgtgtattttgatgctaataaaggtaatcgagcaactgtcacagttaaagtgggtgataaaatcacagctggtcagcagttagttcaatatgatacaacaactgcacaagcagcctacgacactgctaatcgtcaattaaataaagtagcgcgtcagattaataatctaaagacaacaggaagtcttccagctatggaatcaagtgatcaatcttcttcatcatcacaaggacaagggactcaatcgactagtggtgcgacgaatcgtctacagcaaaattatcaaagtcaagctaatgcttcatacaaccaacaacttcaagatttgaatgatgcttatgcagatgcacaggcagaagtaaataaagcacaaaaagcattgaatgatactgttattacaagtgacgtatcagggacagttgttgaagttaatagtgatattgatccagcttcaaaaactagtcaagtacttgtccatgtagcaactgaaggtaaactccaagtacaaggaacgatgagtgagtatgatttggctaatgttaaaaaagaccaggctgttaaaataaaatctaaggtctatcctgacaaggaatgggaaggtaaaatttcatatatctcaaattatccagaagcagaagcaaacaacaatgactctaataacggctctagtgctgtaaattataaatataaagtagatattactagccctctcgatgcattaaaacaaggttttaccgtatcagttgaagtagttaatggagataagcaccttattgtccctacaagttctgtgataaacaaagataataaacactttgtttgggtatacaatgattctaatcgtaaaatttccaaagttgaagtcaaaattggtaaagctgatgctaagacacaagaaattttatcaggtttgaaagcaggacaaatcgtggttactaatccaagtaaaaccttcaaggatgggcaaaaaattgataatattgaatcaatcgatcttaactctaataagaaatcagaggtgaaa

SEQ ID NO: 9966 - protein, 414 aa, Streptococcus agalactiae
MSKRQNLGISKKGAIISGLSVALIVVIGGFLWVQSQPNKSAVKTNYKVFNVREGSVSSSTLLTGKAKANQEQYVYFDANKGNRATVTVKVGDKITAGQQLVQYDTTTAQAAYDTANRQLNKVARQINNLKTTGSLPAMESSDQSSSSSQGQGTQSTSGATNRLQQNYQSQANASYNQQLQDLNDAYADAQAEVNKAQKALNDTVITSDVSGTVVEVNSDIDPASKTSQVLVHVATEGKLQVQGTMSEYDLANVKKDQAVKIKSKVYPDKEWEGKISYISNYPEAEANNNDSNNGSSAVNYKYKVDITSPLDALKQGFTVSVEVVNGDKHLIVPTSSVINKDNKHFVWVYNDSNRKISKVEVKIGKADAKTQEILSGLKAGQIVVTNPSKTFKDGQKIDNIESIDLNSNKKSEVK

SEQ ID NO: 9967 - DNA, 519 bp, Streptococcus agalactiae
atgaaaagaaaagaaattattgatgatgtgaccatgaaacgtgctattacacgtattacctacgaaattatagaacgtaacaaaaatttagataatattgtcttagcaggcattaaaacaagaggtgtttttttagccaaacgcattcaagaacgcttgaagcaattagaaaatttagatattcccgttggagaattggatactaaacctttccgtgatgatatgaaagttgaagttgacaccacaactatgccagttgacatcactgataaagatattatattaattgatgatgttctctatacaggtcgcactattcgagctgctattgataatcttgttagtttagggcgtccgagtcgtgtcagtttagctgtattaattgaccgtgggcatcgtgaactacctattcgtgcagattatgtggggaaaaatattccaacaagtcaatttgaagaaattctagttgaagtgatggaacatgatggttacgatcgtgtgagtattattgatccgagt

SEQ ID NO: 9968 - protein, 173 aa, Streptococcus agalactiae
MKRKEIIDDVTMKRAITRITYEIIERNKNLDNIVLAGIKTRGVFLAKRIQERLKQLENLDIPVGELDTKPFRDDMKVEVDTTTMPVDITDKDIILIDDVLYTGRTIRAAIDNLVSLGRPSRVSLAVLIDRGHRELPIRADYVGKNIPTSQFEEILVEVMEHDGYDRVSIIDPS

SEQ ID NO: 9969 - DNA, 888 bp, Streptococcus agalactiae
atggaaatcacaattaaaatagcaggagttaggctagataaagctttagcggataattctgaactgtcgcgtagtcaagctaatgaagaaattaaaaaagggattgtgttagtaaatggacaagtaaaaaaagcgaaatatactgttcaagaaggagatcggattacttttgatattcctaaagaggaagtactagattatcaagctgaaaatatccctttagatattatctatcaagatgatgacgttgctgtggttaataagccgcaagggatggttgttcacccttctgcaggccacagttcgggcaccttagttaacgccttgatgtatcatattaaggatttatcatcaattaatggcgttgttcgcccagggatcgttcatcgtattgataaagatacttctggtttattgatggttgcaaaaaatgatagagctcaccaagtgttggctgaagagttaaaagataaaaaatcgcttcgtaaatatttagcaattgtgcatggtaatttaccaaatgatcgaggtgtgattgaggctccgattggtagaagcgataaagatcgtaagaagcaagccgtgactgctaaaggtaagccagcaataactcgttttcatgttttagaacgttttggtgattataccttagttgaattgtcattggagacaggtcgaacacaccaaattcgggttcatatggcttatattggccatcctctagccggtgatcctgtctacggtccccgtaagactttagggggtaaaggacagtttttgcatgcacaaacactaggttttacgcaccctagtaacggagagaatttgattttttcagtagaggttccggaaatttttcagacaaccttagaaaagttgagaaaaaat

SEQ ID NO: 9970 - protein, 296 aa, Streptococcus agalactiae
MEITIKIAGVRLDKALADNSELSRSQANEEIKKGIVLVNGQVKKAKYTVQEGDRITFDIPKEEVLDYQAENIPLDIIYQDDDVAVVNKPQGMVVHPSAGHSSGTLVNALMYHIKDLSSINGVVRPGIVHRIDKDTSGLLMVAKNDRAHQVLAEELKDKKSLRKYLAIVHGNLPNDRGVIEAPIGRSDKDRKKQAVTAKGKPAITRFHVLERFGDYTLVELSLETGRTHQIRVHMAYIGHPLAGDPVYGPRKTLGGKGQFLHAQTLGFTHPSNGENLIFSVEVPEIFQTTLEKLRKN

SEQ ID NO: 9971 - DNA, 1152 bp, Streptococcus agalactiae
atgcgcttcatcaataagttaaaaaataatatggagcatgtactctccatttatccagatgtttcagtaaaaacagatcgtgatagaggacatgtatatctcaatggtacagattatcatgaagttgcagagtccttaaaagagatttttggtatccaagctttttctccatcttttaaagtagaaaaaaatgttgatacattggtaaaagctgtccaggaaattatgacttccgtttataaagatgggatgacttttaaaattaccgcaaaacgtagtgaccactcatttgaattggatagccgtgctctaaatcatactttaggagatgctgttttttcagtcttgccaaatattaaggctcagatgaagcaaccagatatcaatcttaaagtcgagatacgagatgaggctgcttatatttcatatgaggatattaggggtgcaggaggattaccagtaggaacatctggaaaagggatgctgatgttgtctggtgggattgattctccggtagcaggttacctagcgttaaaacgtggtgtagatatagaagcagtccattttgcaagtcctccttatactagcccaggtgcattgaaaaaagcacatgatttaacacgtaaattgacaaaatttggtggtaatattcaatttattgaagttccattcacagaaattcaagaggaaattaaggcaaaagctcccgaagcctacttgatgacgttaacacgtaggtttatgatgcgtattacagatcgtattcgtgaggaccgaaatggtcttgttattattaacggtgaaagtttaggacaggtggcaagccaaacgttagaaagtatgcaagctattaatgctgtcactgcaacaccgattattcgtcctgtggtcacgatggataagctagaaattattgatattgctcaaaaaatagatacttttgatatttcaattcaaccatttgaggattgctgtacgatttttgcaccagatcgcccaaaaactaaccctaaaattaagaatacagaacagtatgagaaacgtatggatgtagaaggtcttgtagagagggcagttgcagggattatggtaactactattcaacctcaagcagatagtgatgatgttgatgacttgattgacgatttatta

SEQ ID NO: 9972 - protein, 384 aa, Streptococcus agalactiae
MRFINKLKNNMEHVLSIYPDVSVKTDRDRGHVYLNGTDYHEVAESLKEIFGIQAFSPSFKVEKNVDTLVKAVQEIMTSVYKDGMTFKITAKRSDHSFELDSRALNHTLGDAVFSVLPNIKAQMKQPDINLKVEIRDEAAYISYEDIRGAGGLPVGTSGKGMLMLSGGIDSPVAGYLALKRGVDIEAVHFASPPYTSPGALKKAHDLTRKLTKFGGNIQFIEVPFTEIQEEIKAKAPEAYLMTLTRRFMMRITDRIREDRNGLVIINGESLGQVASQTLESMQAINAVTATPIIRPVVTMDKLEIIDIAQKIDTFDISIQPFEDCCTIFAPDRPKTNPKIKNTEQYEKRMDVEGLVERAVAGIMVTTIQPQADSDDVDDLIDDLL

SEQ ID NO: 9973 - DNA, 654 bp, Streptococcus agalactiae
atgcctcgcagtcttgaagaggctcaagaaatagatttatcaaaatttgatagtgttgatattattgaatggcgagctgatgccttaccaaaggatgacattattaatgtagctccagctatttttgagaaattcgcaggtcatgaaattatttttactcttcgtacaacgcgtgaaggtggtaatattgtcttatctgatgctgagtatgttgagttaatccagaaaattaattctatctacaatccagattatattgattttgagtatttttcacataaagaagtttttcaagaaatgctagaatttccaaatttagtcctgtcttatcacaattttcaagagacaccggagaatattatggagatattttcagaattaacagccctagcaccacgagttgtgaaaatcgcagtaatgccaaagaatgaacaagatgtcttagacgttatgaattacactcgcggtttcaagactattaatcctgatcaagtttatgcgacggtatctatgagtaaaattggacgtatttctcgttttgctggtgatgtaactggatctagttggacatttgcatatttagattcatctatcgcacccggacaaattactatttcagagatgaagcgtgtcaaagcattgcttgacgctgac

SEQ ID NO: 9974 - protein, 218 aa, Streptococcus agalactiae
MPRSLEEAQEIDLSKFDSVDIIEWRADALPKDDIINVAPAIFEKFAGHEIIFTLRTTREGGNIVLSDAEYVELIQKINSIYNPDYIDFEYFSHKEVFQEMLEFPNLVLSYHNFQETPENIMEIFSELTALAPRVVKIAVMPKNEQDVLDVMNYTRGFKTINPDQVYATVSMSKIGRISRFAGDVTGSSWTFAYLDSSIAPGQITISEMKRVKALLDAD

SEQ ID NO: 9975 - DNA, 792 bp, Streptococcus agalactiae
atgtctcacataaaagcagaaaacattatcgtatcttacgatcagaaagaaatcatcaataatctttccctcagtatacttaaccaaaaaataacaacgattattggtgccaatggatgtggaaagtctactcttttgaaggctctcacacgcatccataaaataaaagatggtactatcactattgatggtcatgatattgcacatttacccacaaaggaaattgctaagaagattgcacttctcccacaggtgttagaagcaactgaagggataacagtttatgaactaatatcttatggacggttcccacaccaaaaataccttggcaatttgacaaatgacgatcgcagtaaaatccattgggcgatggaaatgactaacgtagcgcaatttgctaatagagatgttgatgacctttcaggaggtcagaggcaaaaagtatggattgctatggctttagcacaagatacagatactatctttttagacgaacctacaacttatcttgacatgaatcatcaattagaagtcttagaattgctcaaaaaacttaatgacgaaacgcaaaaaacaattattatggtcctacacgacctaaacctgtctgcgcgctattctgattatctagttgcaatgaaaaccggtaaaattatctatgaaggtagtcctagtcagatcatgactaaagatattatcaaagatatttttaagattgatgctcatatcattcaggaccctattagtaaacaacctgttttgttatcttatcaattatcaactgatcaaaat

SEQ ID NO: 9976 - protein, 264 aa, Streptococcus agalactiae
MSHIKAENIIVSYDQKEIINNLSLSILNQKITTIIGANGCGKSTLLKALTRIHKIKDGTITIDGHDIAHLPTKEIAKKIALLPQVLEATEGITVYELISYGRFPHQKYLGNLTNDDRSKIHWAMEMTNVAQFANRDVDDLSGGQRQKVWIAMALAQDTDTIFLDEPTTYLDMNHQLEVLELLKKLNDETQKTIIMVLHDLNLSARYSDYLVAMKTGKIIYEGSPSQIMTKDIIKDIFKIDAHIIQDPISKQPVLLSYQLSTDQN

SEQ ID NO: 9977 - DNA, 582 bp, Streptococcus agalactiae
atgacaaatacacgtaaaatggtgacaatcgccattctttctgccttatcttttgtattgatgatggtttcatttccattaataccaggagcagaatttttaaaggttgatttttcaatccttccgatgttagttgcttttattttatttgatttgaaatcaagttatggtgtactcttattaagatcacttttaaaagttatacttgctaatcgtggtccagaaacgtttattggtttaccgatgaatatggttgctctagctttatttttagcaagtttcgctattttctggaaaaatagagagagtgcaaaagattttattaaagctagtctatttggtacagttagcttgaccgtatctatggtagctctcaactatgtctttgcgattcctttgtatgctatatttgctaactttgatatcagaacatttattggtgtaggcaattaccttttaacaatggttattccatttaatatcgttgagggaattttaatttcgattgttttctatctaacttacgtggcttgtttgccaatattagaaagatataaaaagactaatgttatctcgtcaaaa

SEQ ID NO: 9978 - protein, 194 aa, Streptococcus agalactiae
MTNTRKMVTIAILSALSFVLMMVSFPLIPGAEFLKVDFSILPMLVAFILFDLKSSYGVLLLRSLLKVILANRGPETFIGLPMNMVALALFLASFAIFWKNRESAKDFIKASLFGTVSLTVSMVALNYVFAIPLYAIFANFDIRTFIGVGNYLLTMVIPFNIVEGILISIVFYLTYVACLPILERYKKTNVISSK

SEQ ID NO: 9979 - DNA, 978 bp, Streptococcus agalactiae
ttgattgaaaattatttagaaaaagacatccttaatcaaataaaacttctaactttatgctatgattactacccttccattactctagacaaatcatgtcatcaacttggtttatctgaactacttattaggaaatattgtcatgatttaacaactttatttaacagtcaactctctctgaatatcgaaaagagtacaatagtctaccaatctaatggtgtaactagagaacaagctttcaaatatatttatcatcaatcacacgttttacaacttttaaaatttttgatcacgaatgattcaggcaggttacctttaacttactttagtgaaaaatttggactatcttgtgcaactgcttatcgcatacgaaaacatattagtccattactagaaaaacttggatttcagattgtcaaaaatactattaccggtgacgagtatcgaattcgctatttaatcgcatttttaaatgctcaatttggtatagaagtttatcccatgtctaagatggataaattgctcatcaaacgattgttattagaacactcaactacttttactgcttctcattacttcccaaatacatttattttctttgatacattgttgtctctatcatggaaacgtattaattataatgtagttgtcccttactcatcccttttcactgaactacaaaatatatttatctatgatacattacaatattgtgtcaaaaatgttattatagattcctttaaaattaatttaaaaaaagacgatatagactatatttttcttgcttaccttacttcccataactctttttctaatccaaattggactgagaagcgtatcgataatgtaatagctattttcgaaaattatcccaaattccaaaaattattacagccactcaaagatgctcttcccttatctggctcctatcatgatgagttggtaaaagttgctatctttttttccgaacatttattt

SEQ ID NO: 9980 - protein, 326 aa, Streptococcus agalactiae
MIENYLEKDILNQIKLLTLCYDYYPSITLDKSCHQLGLSELLIRKYCHDLTTLFNSQLSLNIEKSTIVYQSNGVTREQAFKYIYHQSHVLQLLKFLITNDSGRLPLTYFSEKFGLSCATAYRIRKHISPLLEKLGFQIVKNTITGDEYRIRYLIAFLNAQFGIEVYPMSKMDKLLIKRLLLEHSTTFTASHYFPNTFIFFDTLLSLSWKRINYNVVVPYSSLFTELQNIFIYDTLQYCVKNVIIDSFKINLKKDDIDYIFLAYLTSHNSFSNPNWTEKRIDNVIAIFENYPKFQKLLQPLKDALPLSGSYHDELVKVAIFFSEHLF

SEQ ID NO: 9981 - DNA, 924 bp, Streptococcus agalactiae
atggcaacatataatggtcaaggtttcatccacgatcagctagattcaattagaaatcaaacgttgagaccagactatgtcttaatgagggacgatggctctactgatgatactgtaaaggtggttgaagactatataaaagagcaccgtttagatggttggtcaataactagtaatgataaaaatttaggttggcgtttaaattttcgtcaattacttattgatgtgttagcctatgaggttgactatgtcttttttagtgatcaagatgacacatggtatcatcataaaaataagatgcaagttgatattatggaagaacgccaagatataaaccttcttagcgccgatattgatatcaaaaagttatcagaagaggctactattcccaataattttaagttcaatggtgaggaaacaatttctaagtatccattagacttttcatatcataactatcgtcaaggttggactttttgtttacgcaagtcgtttgttgatcaagtaatgactttttacagtgataatttaattttgtcacatgataatctttttgcaggggtatctggtgtcattggttcaggttacaatttaaacagaagtgttggtgaacataagcgacatgctgagaatgcaagtgggaatatcttgaatatgagctcaagttacgaaaggcatttacaagaactgtattttgttttgagttactatatcatccttgtaccatttttagaaaaaagtagctctagtcaattaagggaagctaaagcttatctggattttaatcagcaacgttataaaaatgctcaaaataaagattttgtagcaatacttaaacaaatgatgactaaaaaacggttctatgatagcttttcaaatcgcattcgtgacttggtgtttttattaaaagatataaaaaggagt

SEQ ID NO: 9982 - protein, 308 aa, Streptococcus agalactiae
MATYNGQGFIHDQLDSIRNQTLRPDYVLMRDDGSTDDTVKVVEDYIKEHRLDGWSITSNDKNLGWRLNFRQLLIDVLAYEVDYVFFSDQDDTWYHHKNKMQVDIMEERQDINLLSADIDIKKLSEEATIPNNFKFNGEETISKYPLDFSYHNYRQGWTFCLRKSFVDQVMTFYSDNLILSHDNLFAGVSGVIGSGYNLNRSVGEHKRHAENASGNILNMSSSYERHLQELYFVLSYYIILVPFLEKSSSSQLREAKAYLDFNQQRYKNAQNKDFVAILKQMMTKKRFYDSFSNRIRDLVFLLKDIKRS

SEQ ID NO: 9983 - DNA, 933 bp, Streptococcus agalactiae
atggtaaagacagcagttttaatggcgacatacaatggcgaaatatttatatctgaacaacttgattcaattcgccaacagacattaaaaccagattatgtattattgagggatgattgttcaacggatgaaacagtcaatgtcgtcaataactatatcgcaaaacatgagttagaaggctggaaaattgttaaaaacgacaaaaacttaggctggcgtttaaattttcgtcaattacttattgatgtgttagcctatgaggttgactatgtcttttttagtgatcaagatgatatttggtatcttgataaaaacgaacgacagtttgccattatgtcagataaacctcaaattgaggttttgagtgcagacgttgatatcaaaacgatgtctacagaagccagtgttccacattttctaactttttcttctagtgatagaatcagtcagtatcctaaagtatatgattatcaaacattccgtcccggatggaccattgctatgaagagagattttgcgcaagctatcgctgataattggacttttggagctaatatttcgcacgataatcttatcgagacaactgccagtattattggaaatggttataaccttaacgaaagcgtaggagttcatattcgatatggaggaaacgcaagtggtaatagcaaatttgttttgaattggaagtcgcctaaaacacaacatatcacaggattaaaaacatttgttgatttttacgaaaccatgcagaaggttgtcaacaaatatcaaaatgatgtcgctttaaatcaacgcttagcctttgaaaaagaaagattggaagcttctaaattgtcattaattcataatagtgcttttgtgattaaaaattggcgactctataactctaatagtggacgtatgagagatttattatttgcgtttaaaaag

SEQ ID NO: 9984 - protein, 311 aa, Streptococcus agalactiae
MVKTAVLMATYNGEIFISEQLDSIRQQTLKPDYVLLRDDCSTDETVNVVNNYIAKHELEGWKIVKNDKNLGWRLNFRQLLIDVLAYEVDYVFFSDQDDIWYLDKNERQFAIMSDKPQIEVLSADVDIKTMSTEASVPHFLTFSSSDRISQYPKVYDYQTFRPGWTIAMKRDFAQAIADNWTFGANISHDNLIETTASIIGNGYNLNESVGVHIRYGGNASGNSKFVLNWKSPKTQHITGLKTFVDFYETMQKVVNKYQNDVALNQRLAFEKERLEASKLSLIHNSAFVIKNWRLYNSNSGRMRDLLFAFKK

SEQ ID NO: 9985 - DNA, 1053 bp, Streptococcus agalactiae
atgattaaatttagtaataaaattgtacaagaagatttagcacttattagtaaccaaaattatattaattgggaaagaattgctaataaaggcgttttaataagtggttctaatagtatgttagcgagttatatggtatttttactagcctatctcaatgagacaagaaattaccaaacgcaaattattgcgacagctagaaacattgaaaaagcccgtgataaattttcagatttagttgggaaagattatttcaccttaattccttatgatgtagaagaacgcctagagtatgatggaaaagtggattacattatccatgcagcaagcaatgctagtccaactgctattttgagtaatcctgttagcatcataaaagctaatacaattggtacattgaatttattagactttgcaaaggaaaaaacaattgaaaacttcttgttcttatcaacgcgtgaagtatatggaacatctattaaagaagtgattgatgaagaagcttatggtggatttgatattttagctactagagcttgttacccagaaagcaaacgtatggctgaaactctactgcaaagttactatgatcaatataaggtaccctttactattgctcgtattgcacattcatttggtcctggtatggagcttggtaacgatggtcgtattatgaatgatcttttatcgaatgtcattgatggcaaagatatcgttttaaaaagtagtggtacagcagagcgtgctttctgttatttagcagatgctgtatcagggttatttactattttattaaatggtgaagttggtcaagcttacaatgtagcaaatgaagatcaacccattatgattaaggatttggcacaaaagttagttgatctcttttctgataaaaatatttcagtagtattcgatattcctaaaactatgagtgcaggttatagcaaaatggggagaacacgtctcactatggccaaattagaagcgttgggatggaagcgagaagtttctcttgaatctggaatattaaaaacagtacaagcatttgaggag

SEQ ID NO: 9986 - protein, 351 aa, Streptococcus agalactiae
MIKFSNKIVQEDLALISNQNYINWERIANKGVLISGSNSMLASYMVFLLAYLNETRNYQTQIIATARNIEKARDKFSDLVGKDYFTLIPYDVEERLEYDGKVDYIIHAASNASPTAILSNPVSIIKANTIGTLNLLDFAKEKTIENFLFLSTREVYGTSIKEVIDEEAYGGFDILATRACYPESKRMAETLLQSYYDQYKVPFTIARIAHSFGPGMELGNDGRIMNDLLSNVIDGKDIVLKSSGTAERAFCYLADAVSGLFTILLNGEVGQAYNVANEDQPIMIKDLAQKLVDLFSDKNISVVFDIPKTMSAGYSKMGRTRLTMAKLEALGWKREVSLESGILKTVQAFEE

SEQ ID NO: 9987 - DNA, 717 bp, Streptococcus agalactiae
atgaatattggagttatttttgcaggtggtgttggtcgtcgcatgaataccaaaggtaaaccaaagcaattcctagaagtgcatggtaaacccattattgtacacacaattgatattttccaaaatacagaagctattgatgctgtagtagttgtctgtgtatcagactggctagattatatgaataatctggtagagcgtttcaaccttacgaaagtaaaagcagttgttgcaggtggagaaactggccaaatgtcaatttttaaggggcttgaagccgctgaacagctggctacagatgatgccgttgttttaattcatgacggagtacgtccattgattaatgaagaagttattaatgctaatatacagtcagtaaaagaaacaggaagtgcggtaacttcagttcgtgctaaagagacagttgttctagtcaatgattcttctaaaatatctgaagttgttgatcgtactcgttccttcattgctaaagcgccacaaagtttttatctatcagatatcctttctgttgaacgtgatgccattagcaaagggattactgatgcaattgattctagtactttgatgggtatgtacaatcgtgaactcactattgttgagggaccatatgaaaatatcaagataacaacaccagatgatttttatatgtttaaagctttgtatgatgctagagaaaatgaacaaatttatgggatg

SEQ ID NO: 9988 - protein, 239 aa, Streptococcus agalactiae
MNIGVIFAGGVGRRMNTKGKPKQFLEVHGKPIIVHTIDIFQNTEAIDAVVVVCVSDWLDYMNNLVERFNLTKVKAVVAGGETGQMSIFKGLEAAEQLATDDAVVLIHDGVRPLINEEVINANIQSVKETGSAVTSVRAKETVVLVNDSSKISEVVDRTRSFIAKAPQSFYLSDILSVERDAISKGITDAIDSSTLMGMYNRELTIVEGPYENIKITTPDDFYMFKALYDARENEQIYGM

SEQ ID NO: 9989 - DNA, 777 bp, Streptococcus agalactiae
atgttagcttatattgataaagttgcgcgtgataataaaattgaatattctttaggcggaggcagcctactgggagcaatgagacataaaggattcattccatgggatgacgatattgatttgatgctagaaagaagccagtatgagcgtttgatgaaagcattagctgatgctaataatagcgattttaaattgctacatcattctgttgaaaaaaatctatggccatttgccaagctgtatcacacaaagtcaatgtacttaagtaaaacagatagaattcatccttggacagggatttttattgatatcttcccacttgaccgattaccagagagtgcagaagaacgtcaaagattctttaaaaaagttcactctgctgctgcaaatttgatgtgtacgacttaccccaattttgctagcggttcccgaaagctttatgcaaatgcaaggctaattttggggctaccccgattcatcgcttatcacggccaagctaaaaaacgtgctgaaattgttgatcaagtgatggaaacatataataatcaagaggttccttacatgggttataccgattcaagatatcgcttgaaagaatattttccaagagaaattttttctgagtatgaagatgttatgtttgaaaacattaaaacccgaaaaattaaaaatgagcatgcttatctgaatcaattatatgggggtagttatatggaattacctccagaaagtaagagagaaagtcatagttattacacttggtactggaaagaaggt

SEQ ID NO: 9990 - protein, 259 aa, Streptococcus agalactiae
MLAYIDKVARDNKIEYSLGGGSLLGAMRHKGFIPWDDDIDLMLERSQYERLMKALADANNSDFKLLHHSVEKNLWPFAKLYHTKSMYLSKTDRIHPWTGIFIDIFPLDRLPESAEERQRFFKKVHSAAANLMCTTYPNFASGSRKLYANARLILGLPRFIAYHGQAKKRAEIVDQVMETYNNQEVPYMGYTDSRYRLKEYFPREIFSEYEDVMFENIKTRKIKNEHAYLNQLYGGSYMELPPESKRESHSYYTWYWKEG

SEQ ID NO: 9991 - DNA, 726 bp, Streptococcus agalactiae
atgaaaaaaattttactagtgatacctgcttataatgaagaaggtagtattgcaaagacagtccagactattgtagattttaaggcgtctcgctcactaccttttgagctggattatattgttattaacgatgggtcaaccgatggtactccagagttattagatagattgggtttaaatcatattgaccttgttcaaaatctaggtattggtggctgtgtgcagacaggatacttatacgctaatcgtaatcattacgatgttgccgttcaatttgatggtgatggtcaacatgatattagaagcattgaagatgttgttatgccaatcttaaatgacgaagcagattttgttattggttctcgctttgttgataaaaaacatcaaaattttcaatcgacagcaatgaggcgtcttggcataaatttaatatctgctgctataaaattaacgacgggacacaaagtctatgatacaacaagtggttatagggcagccaacgcggcgctaatagcttatttatcgtgtcattatccagtacaatacccagagcctgaatcaactgctcggattttgaaaaaaggctatcgtttgaaggaagtcacagctaatatgtttgaacgtgaggcaggtacttcaagtataagttccctaaaatcgattttttatatgacggatgttttaacatcaattattattgcagggtttattaaggaggatgataaa

SEQ ID NO: 9992 - protein, 242 aa, Streptococcus agalactiae
MKKILLVIPAYNEEGSIAKTVQTIVDFKASRSLPFELDYIVINDGSTDGTPELLDRLGLNHIDLVQNLGIGGCVQTGYLYANRNHYDVAVQFDGDGQHDIRSIEDVVMPILNDEADFVIGSRFVDKKHQNFQSTAMRRLGINLISAAIKLTTGHKVYDTTSGYRAANAALIAYLSCHYPVQYPEPESTARILKKGYRLKEVTANMFEREAGTSSISSLKSIFYMTDVLTSIIIAGFIKEDDK

SEQ ID NO: 9993 - DNA, 1152 bp, Streptococcus agalactiae
atgcaagatgttttcattataggaagtagagggttgccagctcgttacggtggttttgaaacttttgtttcagaattgattaatcatcaaaaaagtttcgacataaaataccatgttgcatgccttagtgataaagaacatcatactcattttaactttgctgacgctgattgttttactataaatcctccccaattagggccagcacgtgtgattgcttatgatattatggccattaattatgcccttgacttggttaagacacatgatttaaaagagcctattttttatattttaggaaatacaattggtgcctttatttggcattttgccaataaaatacataaagtcggtggcttattgtatgttaatccggatggtttagagtggaagcgatcaaagtggtctcgtcccacacagcgttatttaaaatacgccgaaaaatgtatgactaaaaatgcagacctaattatttctgataatattggtattgaaaattacattcaatctacctactctaatgtgaagacaaggttcattgcttacggtacagagattaattctaggaaattatcgtcagatgatccacgtgtcaaacagttgtttaaaaaatggaatattaagtctaagggttactatctaatcgttggtcgatttgtccctgaaaacaattatgaaacggctattagggagttcatggcttcagatactaagcgtgatttagttattatctgtaaccatcaaaataacccctactttgaaaagttgtccttaaagacaaaccttcaacaagataaaagagttaagtttgtaggtacgctctatgaaaaagatctgctggattatgttcgtcaacaagcctttgcttatattcatgggcatgaagttggcggtactaatccaggactgcttgaggctttagctaatactgatttgaatcttgttctagatgttgatttcaacaaatcagtagcaggtctctcaagtttttactgggctaaaaaagagggggatttagctaagcttattaacgatagtgatcaacaacaggatttatctacttacggtgatcgagcaaaagccattattcaagaaaactatacttggaaaaaaattgttgaagaatatgaggatttgtttttaaatgaaagt

SEQ ID NO: 9994 - protein, 384 aa, Streptococcus agalactiae
MQDVFIIGSRGLPARYGGFETFVSELINHQKSFDIKYHVACLSDKEHHTHFNFADADCFTINPPQLGPARVIAYDIMAINYALDLVKTHDLKEPIFYILGNTIGAFIWHFANKIHKVGGLLYVNPDGLEWKRSKWSRPTQRYLKYAEKCMTKNADLIISDNIGIENYIQSTYSNVKTRFIAYGTEINSRKLSSDDPRVKQLFKKWNIKSKGYYLIVGRFVPENNYETAIREFMASDTKRDLVIICNHQNNPYFEKLSLKTNLQQDKRVKFVGTLYEKDLLDYVRQQAFAYIHGHEVGGTNPGLLEALANTDLNLVLDVDFNKSVAGLSSFYWAKKEGDLAKLINDSDQQQDLSTYGDRAKAIIQENYTWKKIVEEYEDLFLNES

SEQ ID NO: 9995 - DNA, 375 bp, Streptococcus agalactiae
atgattaaagaactaaaagaatttttatttaagggtaatgttttagaccttgctgttgctgttattttaggtgcagcttttaatgctatcatcacttcacttgttaaagacgttattacaccgcttatccttaatcctgtattaaaagctgctggcgtttcaaatatcgcacagctttcatggaatggtgttgcttacggtaatttcttaagtgcagttattaatttcttaatcgttggtactactttattcttcatcgttaaagctgctaacaaggttatggctaagaaacctgctgaagaagaaattattgaagttgttgaaccaacacaagagcaattacttgctgaaatccgcgacttactcgctaacaaa

SEQ ID NO: 9996 - protein, 125 aa, Streptococcus agalactiae
MIKELKEFLFKGNVLDLAVAVILGAAFNAIITSLVKDVITPLILNPVLKAAGVSNIAQLSWNGVAYGNFLSAVINFLIVGTTLFFIVKAANKVMAKKPAEEEIIEVVEPTQEQLLAEIRDLLANK

SEQ ID NO: 9997 - DNA, 1017 bp, Streptococcus agalactiae
gtgtttttactattatgtattttatcgatgtggctcatgatttttggggttgcattctattactttgggtcgctacatcaatcattgacttcaaggattatttatcagtttgtacttactgttttgctaacgacaacagcttggttcatgggtgcctattttttagcatttgaaggtcattttaaaactgtctttcaattccaagaagcagatggtaaacaaattgtaaattgtttatttcaactttgtttcgccctttacgcagtagtaatgcttattgggtcaattattgatagagttcagacgaagcgacttttattagctgttgtttcttggcttttcttggtgtatacgcccttagcttatttaatttggaattcagagggtgtttttgcaaagatgggagtacttgatttttcaggcggaatgatcgttcatttatctgcagggctttcttcgtatattttagctcatgttattggcaagagtgaacatcagcacaataaggttaaaaatgatagtctctttttaggaatgatacttattacatttggttggtttggatttaatatgggtccagttggtgagtggaattcacaagccattatgatacttttaaatactatatttgctattataggtggtggtttggcgtggacattggctgctaagtggaatggtgaggaagagaaaacaggaagcttattgaatggcattattgttggtcttgtgacgagtacagcaggagttgggtatctcttaacttggcaattattagctgtaacattctttgcatccctcttcacctactttgtaacggattacgttgcgaaagcttttgccattgatgatgtcgtttcctcctttggaatgaatggtattgggggattgttgggaagtttaggagttggtctctttaaattatcacatatgccagttcaactgttagcattagctaccacaattcttttgtcaattataatgacctatatcatatctaaagcgatttttagaaaa

SEQ ID NO: 9998 - protein, 339 aa, Streptococcus agalactiae
MFLLLCILSMWLMIFGVAFYYFGSLHQSLTSRIIYQFVLTVLLTTTAWFMGAYFLAFEGHFKTVFQFQEADGKQIVNCLFQLCFALYAVVMLIGSIIDRVQTKRLLLAVVSWLFLVYTPLAYLIWNSEGVFAKMGVLDFSGGMIVHLSAGLSSYILAHVIGKSEHQHNKVKNDSLFLGMILITFGWFGFNMGPVGEWNSQAIMILLNTIFAIIGGGLAWTLAAKWNGEEEKTGSLLNGIIVGLVTSTAGVGYLLTWQLLAVTFFASLFTYFVTDYVAKAFAIDDVVSSFGMNGIGGLLGSLGVGLFKLSHMPVQLLALATTILLSIIMTYIISKAIFRK

SEQ ID NO: 9999 - DNA, 1245 bp, Streptococcus agalactiae
atggaaaaaaatacttggaaaaaattacttgttagtactgctgctctttcagtagttgcaggaggagcaattgctgctactcactctaactcagttgatgctgcttcaaaaacaactatcaaactttgggtcccaacagattcaaaagcgtcttataaagcaattgttaaaaaattcgagaaggaaaacaaaggcgttactgtaaaaatgattgagtctaatgactccaaagctcaagaaaacgtaaaaaaagacccaagcaaggcagccgatgtattctcacttccacatgaccaacttggtcaattagtagaatctggtgttatccaagaaattccagagcaatactcaaaagaaattgctaaaaacgacactaaacaatcacttactggtgcacaatataaagggaaaacttatgcattcccatttggtattgaatctcaagttctttattataataaaacaaagttaactgctgacgacgttaaatcatacgaaacaattacaagcaaagggaaattcggtcaacagcttaaagcagctaactcatatgtaacaggtcctcttttcctttctgtaggcgacactttatttggtaaatctggtgaagatgctaaaggcactaactggggtaatgaagcaggtgtttctgtccttaaatggattgcagatcaaaagaaaaatgatggttttgtcaacttgacagctgaaaatacaatgtctaaatttggcgatggttctgttcatgcttttgaaagtggaccatgggattacgacgctgctaaaaaagctgtcggtgaagataaaatcggtgttgctgtttacccaacaatgaaaatcggtgacaaagaagttcaacaaaaagcattcttgggcgttaaactttatgccgttaaccaagcacctgctggttcaaacactaaacgaatctcagctagctacaaactcgctgcatatctaactaatgctgaaagtcaaaaaattcaattcgaaaaacgtcatatcgttcctgctaactcatcaattcaatcttctgatagcgtccaaaaagatgaacttgcaaaagcagttatcgaaatgggtagctcagataaatatacaacggttatgcctaagttgagtcaaatgtcaaccttctggacagaaagtgctgctattcttagcgatacttacagtggtaaaatcaaatctagcgattaccttaaacgtctaaaacaattcgataaagacatcgctaaaacaaaa

SEQ ID NO: 10000 - protein, 415 aa, Streptococcus agalactiae
MEKNTWKKLLVSTAALSVVAGGAIAATHSNSVDAASKTTIKLWVPTDSKASYKAIVKKFEKENKGVTVKMIESNDSKAQENVKKDPSKAADVFSLPHDQLGQLVESGVIQEIPEQYSKEIAKNDTKQSLTGAQYKGKTYAFPFGIESQVLYYNKTKLTADDVKSYETITSKGKFGQQLKAANSYVTGPLFLSVGDTLFGKSGEDAKGTNWGNEAGVSVLKWIADQKKNDGFVNLTAENTMSKFGDGSVHAFESGPWDYDAAKKAVGEDKIGVAVYPTMKIGDKEVQQKAFLGVKLYAVNQAPAGSNTKRISASYKLAAYLTNAESQKIQFEKRHIVPANSSIQSSDSVQKDELAKAVIEMGSSDKYTTVMPKLSQMSTFWTESAAILSDTYSGKIKSSDYLKRLKQFDKDIAKTK

SEQ ID NO: 10001 - DNA, 1482 bp, Streptococcus agalactiae
atggaatggctctttattaaaccagatcaaatttctgactttgtaactacagaaaataattatcttacatcgtcaaagttattgcaaaaactacctcgaaaaatatctgctcttttgttgacagagcaaacttatggaccagagttatctagtttatcgtcattctttgaggtttatgaagtattttatcctaaagataaacatgctacggggataacagaagagtttttacgctcgaaaatggcccaacgatatgatagtagctctccagatcagctaattcgtcaattttataaagggctttttataggacaatacggagagaaacttcaagtttcacaaatacaaattagaaatgattttgaaggtgtagtaaactatcagggaaataactatcttgaattagaagggcaatttggtgagaactatagttttttgcttaattttgcttacaatattccattttcatcggatttttataatgagttatttttagaacacattatagagggtgatatagatattcgattggttatctcgttgattgttgatggttctgttgatgatattgctaaagagtggtactttgagaaggaagacctaaatcaacttatttctttagagtccgatattagtggtagccttgcagttaaactttttgctaagggaaagggtatcgttaagttaggtccattgcaccgtcgtaatggtagaggaggattgggcacatttctactaggaggagaacgtcacatagatgctataggtcatgaatttatgacttattttgatccagtagatttcaaaccacctctaactgtttatttttcgggatttcgttcagctgaaggctttgagggattctggatgatgaagagtatgaagactccattcatgttaatttgtgatccacgattacaaggtggtgccttttatataggaagcaaagaatatgaacaaaaaatagttgatgctattcaagaaaaactggcctttttaaattttagttctgatcagttaattttatccggactttcaatggggacttatggtgctacttaccatggtgctaagctaaatcctcatgctattattattggtaaaccaatatttaatttaggaacagttgctcaacgtgaaagattagagagaccagatggatttgctacttcattagatattcaactactcaatcaaggtgacttgaccagttcctcttctgagaagttaaataactatttttggaaatctatagaagaaggagatttttcaaatacgacttttgccttagcctatatgaaaaacgatgactatgatgcgactgccttttctgatttattgcaatattttagaggaaagaagcataagatattaggcagaggttgggatggccgacatggtgattgttctgcagaagttggtgcatggtttacaagtcagtataggcgaatgctatctaatgattttggaaggaaagaagaa

SEQ ID NO: 10002 - protein, 494 aa, Streptococcus agalactiae
MEWLFIKPDQISDFVTTENNYLTSSKLLQKLPRKISALLLTEQTYGPELSSLSSFFEVYEVFYPKDKHATGITEEFLRSKMAQRYDSSSPDQLIRQFYKGLFIGQYGEKLQVSQIQIRNDFEGVVNYQGNNYLELEGQFGENYSFLLNFAYNIPFSSDFYNELFLEHIIEGDIDIRLVISLIVDGSVDDIAKEWYFEKEDLNQLISLESDISGSLAVKLFAKGKGIVKLGPLHRRNGRGGLGTFLLGGERHIDAIGHEFMTYFDPVDFKPPLTVYFSGFRSAEGFEGFWMMKSMKTPFMLICDPRLQGGAFYIGSKEYEQKIVDAIQEKLAFLNFSSDQLILSGLSMGTYGATYHGAKLNPHAIIIGKPIFNLGTVAQRERLERPDGFATSLDIQLLNQGDLTSSSSEKLNNYFWKSIEEGDFSNTTFALAYMKNDDYDATAFSDLLQYFRGKKHKILGRGWDGRHGDCSAEVGAWFTSQYRRMLSNDFGRKEE

SEQ ID NO: 10003 - DNA, 1005 bp, Streptococcus agalactiae
atgcgagtacatattacaagtatatatgggcagtcaccgcgtagcattgcccttatatcacaaaaactagttaaggatgtcggacgtcaacttggttatgatgaaatgggaatctacttttataatgatcatgctgaaacgcatggtgaaagaagtactaggatggatggtatcattgcgggattaggcagaggggatattgttgtttttcaagtacctacatggaattcaacagaatttgatgaactttttctagataaattacaggcatacggtgctagaattataacttttgtacatgatattgttcccttaatgtttgagtctaatttttatttattagatagagtaattgacatgtataatcgttcggatgttgttattctacctacaaaagcgatgcatgattatctaattgaaaaagggatgactacctctaaagttctttatcaagaagtatgggatcatccagttaatatagacctccctcgtccagaatgtcaaaaagtccttagttttgcaggcgatattcaacgctttccctttgtcaatgactggaaggaaaatatcccgctcatctattatggagacggaagcagactcaattctgaggcaaatgttcatgctcagggatggaaagatgatgtagaattgatgctaagtctttctaagcggggaggatttggcctgtgttggagtgaagatagagaggagttagtcgagcgtcgttattcgaggatgaatgcctcgtataaattatctactttcttggctgctggacttccaattattgctaaccatgatatttcaagtagagactttatcaaacaacacggattaggatttacagttgaaacgctagaagaagctgttgaaaaaattaataatatggaaaaagagacttatgacagctatgtggaaaatgttgagaagatagcaactctcttgcgaaatggttatatcactaaaaaattgttgatagatgctgtgcatatgctttataga

SEQ ID NO: 10004 - protein, 335 aa, Streptococcus agalactiae
MRVHITSIYGQSPRSIALISQKLVKDVGRQLGYDEMGIYFYNDHAETHGERSTRMDGIIAGLGRGDIVVFQVPTWNSTEFDELFLDKLQAYGARIITFVHDIVPLMFESNFYLLDRVIDMYNRSDVVILPTKAMHDYLIEKGMTTSKVLYQEVWDHPVNIDLPRPECQKVLSFAGDIQRFPFVNDWKENIPLIYYGDGSRLNSEANVHAQGWKDDVELMLSLSKRGGFGLCWSEDREELVERRYSRMNASYKLSTFLAAGLPIIANHDISSRDFIKQHGLGFTVETLEEAVEKINNMEKETYDSYVENVEKIATLLRNGYITKKLLIDAVHMLYR

SEQ ID NO: 10005 - DNA, 618 bp, Streptococcus agalactiae
atgatagaaaattttttagaaaaaaatattcttaataaagttaaattacttactttatgttatgataccccctcactatccttagataccgcctgtaaccgactccacttatcaccagttgagcttaaaaactattgtcataaattaaatgttttatttggtcataaactttctatccatatccaaaaaaaacggattttatgtaagctaaataaacttactcaggaagatgccttaaaaatagtttataatgagtcaaacactttacaacttcttaaatttttaattgatgactcgtctgataaaaaatctctagtagcttttggaaatgatctcttcttatctcgttcttctgtctatcgtctgcgagaaaatttaattcctttaattaaagatttaggattatctttatctaaaaataccattgtaggtgacgaatatcgcattagatatctcatcgcatacctcactactaaatttggtattaaaatttacgatctgtctgctctagatattaagattattcgacaatttttatttgagagtggtactaatataagacctactacgcacctttctgatatctttgttttttttgatacgcttttcattttaacc

SEQ ID NO: 10006 - protein, 206 aa, Streptococcus agalactiae
MIENFLEKNILNKVKLLTLCYDTPSLSLDTACNRLHLSPVELKNYCHKLNVLFGHKLSIHIQKKRILCKLNKLTQEDALKIVYNESNTLQLLKFLIDDSSDKKSLVAFGNDLFLSRSSVYRLRENLIPLIKDLGLSLSKNTIVGDEYRIRYLIAYLTTKFGIKIYDLSALDIKIIRQFLFESGTNIRPTTHLSDIFVFFDTLFILT

SEQ ID NO: 10007 - DNA, 840 bp, Streptococcus agalactiae
atggaaacatatactttatcgaatactcttaacattcctaaaattggttttgggacatggcaactaactgaaggtgaagaagcttataaggcagtgactcatgctttaaaagttggttatactcatattgatactgctcagatttatggtaatgaacatagtgttggacgtgctataagagacagtggtttggcaagagaaagtatctttttgacaactaagatttggaatgacaaacatgactatcatttagccaaagcttctattgatgaatctctgcagaaattaggtgttgattatattgatcttcttttgattcattggccaaatccaaaagctcttcgtgaaaatgatgcgtggaaagctgggaatgcaggcacttggaaagcgatggaagaagcttataaagaaggaaaggtaaaagctattggtgtttcgaatttcatgaaacatcacttagaggctttatttgaaactgccgaaataaaacctatggttaatcaaattatcctagcaccaggttgtgctcaagaggatttggttcgcttctgtaaaggaaatgatatcttattagaagcttacagtccatttggaacaggtgctatttttgaaaatgaatctataaaagctattgctgaaaaatatggtaaatcagttgcgcaagtagctcttcgctggtcacttgataatggctttttaccattacctaagtcagcgactcccaaaaatattgaagcaaaccttgatatttttgattttcaattaaacgaagatgatattgctaccttaatacaactagattcaggtattaaacccaaagatccagataatgtctcattt

SEQ ID NO: 10008 - protein, 280 aa, Streptococcus agalactiae
METYTLSNTLNIPKIGFGTWQLTEGEEAYKAVTHALKVGYTHIDTAQIYGNEHSVGRAIRDSGLARESIFLTTKIWNDKHDYHLAKASIDESLQKLGVDYIDLLLIHWPNPKALRENDAWKAGNAGTWKAMEEAYKEGKVKAIGVSNFMKHHLEALFETAEIKPMVNQIILAPGCAQEDLVRFCKGNDILLEAYSPFGTGAIFENESIKAIAEKYGKSVAQVALRWSLDNGFLPLPKSATPKNIEANLDIFDFQLNEDDIATLIQLDSGIKPKDPDNVSF

SEQ ID NO: 10009 - DNA, 672 bp, Streptococcus agalactiae
atgacaaaagaagatatcaaaaaacaagttcgaagagcttttgattttcgtatggcgattcgtgtttataataataatgatattcctaaagaagatatggagtatattttagatactgcttggttgagtccttcttcagtcggtttagaaggctggcgatttttggtactagatagacaaacaattgcaaaatttcgagataaacttaaggaagttgcttggggagcacaatatcaactagatactgctagtcactttgttttactactagctgaaaaaggtgcttattataacgctgatagcatgattaacagtctcattcgacgtggtctaggtgatccagctgcccttgagagtaggatacctctctacaaatccttccaagaaaacgatatgaaaattgattctgaacgttctctttgggattggacagcaaaacaaacttatatcgcactcggtaatatgatgacggctgctgctatgatcggcgtagattcatgcccaattgaaggatttgactatgaaaaggtcaataatatccttagtaaagaaggattaatagacgataagaaagaagctatttcttgtatggtttcatttggttatcgtttgcgtgaacctaaacattcccgtgctaggaaagaacgccaagaagtcattacttgggttgag

SEQ ID NO: 10010 - protein, 224 aa, Streptococcus agalactiae
MTKEDIKKQVRRAFDFRMAIRVYNNNDIPKEDMEYILDTAWLSPSSVGLEGWRFLVLDRQTIAKFRDKLKEVAWGAQYQLDTASHFVLLLAEKGAYYNADSMINSLIRRGLGDPAALESRIPLYKSFQENDMKIDSERSLWDWTAKQTYIALGNMMTAAAMIGVDSCPIEGFDYEKVNNILSKEGLIDDKKEAISCMVSFGYRLREPKHSRARKERQEVITWVE

SEQ ID NO: 10011 - DNA, 1644 bp, Streptococcus agalactiae
atgacaagtaaagcattaatatggtctatattacagattgatagtgctagagcttataatagttttttatattaccttcagaaaatcccctggttgggaagaaaaatccctaaccgatggtttaaaaccgatgatataaaaggtgtagtactatttattcgtatcattttctttttcttaagaggttttggtcgttccataggttacgtactatattgttatgttttatcattttttgttagaagtggcatgaagcagttaaatattttaccgcaagaaggttttaccctaactttaacattgatggtgattacctctcttttaattgtcataaatttctatataaaacttatagaacctaatgatatgcaacaaactcatatgattcgccttttcagaattgagccatcgaggtatttccaatccgctgaacttttagaagccagtagtgaactattttttagaagtttgagctttggcatatttttccatttaaatcactttgctttttggcatggtttgacttttgctttatttttagcaggtagtcgccttggaatcaaggtgctctgtttacctttatatggtagaggtaaagaccaagagaatccagagtctttactaaatattttattttacttagggattggtataggagtcttcctttctctctttttccttcttcttggcaaacagttctctccatatccatttttttcatggtacaccggtattgcaggacttatcatatggttagttagttactatcgattaaaaacttattctaaacttaaccacttgacctaccttaccctaacgcatgagacgatgaaggagaaaattgcaaagattgataatatagagctgcttgggattgaaatgaaagatagggatataaatgtcagtgaactttctcccctgctatttgaaaatttatcaggtatttcatatttaaacgctatctttttaaaacggatgagtatatacttgcaaaggaaaattttggtacgtttagctgttttaagtgttctgtttggaatagaactccttttcctgctattttttaaagaaaagataaatattccgatgaatgagcatagtttttcaaaattcctatttttgagtgcagttccaggatatctaatatatatcggtgaatcctattcaaaattttgtttctatcatttggatcgtccattattaagatataatttctatcgtgaaagagaaaatatcttagcaaccttaaaaatacgtttcctttatagtataaaacttaatttccccatttttgtagctttaaacatatgttttggaacctattattttaattttttcacccctaagattgatcagattatcatattagtaattacacaagctatatcaatgattttatttagtttttactttttgtatctttatttcttcttacagccttttacagaaggattaaaatcaaagagtgctatgtataatattttaacctttattatatactatatgggatataagctatttacctttactaaatctataacgatgccaatattattagtaagcctaggaattatagttgttattttaattattggctatttagcagttgtagtatttgctccaaaaactttccgtttaaaaagt

SEQ ID NO: 10012 - protein, 548 aa, Streptococcus agalactiae
MTSKALIWSILQIDSARAYNSFLYYLQKIPWLGRKIPNRWFKTDDIKGVVLFIRIIFFFLRGFGRSIGYVLYCYVLSFFVRSGMKQLNILPQEGFTLTLTLMVITSLLIVINFYIKLIEPNDMQQTHMIRLFRIEPSRYFQSAELLEASSELFFRSLSFGIFFHLNHFAFWHGLTFALFLAGSRLGIKVLCLPLYGRGKDQENPESLLNILFYLGIGIGVFLSLFFLLLGKQFSPYPFFSWYTGIAGLIIWLVSYYRLKTYSKLNHLTYLTLTHETMKEKIAKIDNIELLGIEMKDRDINVSELSPLLFENLSGISYLNAIFLKRMSIYLQRKILVRLAVLSVLFGIELLFLLFFKEKINIPMNEHSFSKFLFLSAVPGYLIYIGESYSKFCFYHLDRPLLRYNFYRERENILATLKIRFLYSIKLNFPIFVALNICFGTYYFNFFTPKIDQIIILVITQAISMILFSFYFLYLYFFLQPFTEGLKSKSAMYNILTFIIYYMGYKLFTFTKSITMPILLVSLGIIVVILIIGYLAVVVFAPKTFRLKS

SEQ ID NO: 10013 - DNA, 597 bp, Streptococcus agalactiae
gtgtcaatgcttatgacaaaaataataggactgacaggagggatagcttctggaaagtcaacggtaacaaaaataatacgagaatcaggttttaaagtcatagatgcggatcaagtggttcataaattgcaagctaagggtgggaaactttaccaagctttattagaatggttgggtcccgagatacttgatgctgatggtgagttggatagaccaaagctttctcaaatgatttttgctaatccagacaatatgaagacatcagctaggctacaaaatagtatcattcgtcaagagttagcatgtcagcgcgaccaattaaaacaaacagaagagatatttttcatggatattcctttattgattgaagaaaagtatataaaatggtttgatgagatttggttggtatttgttgataaagaaaaacaattacaacgattaatggcccgtaacaactacagtcgagaagaagcagaattacgactttcacaccaaatgcctttaacagataaaaaaagtttcgctagtcttattattgacaataatggtgatttaataactttaaaagagcaaatattggatgctcttcaacgttta

SEQ ID NO: 10014 - protein, 199 aa, Streptococcus agalactiae
MSMLMTKIIGLTGGIASGKSTVTKIIRESGFKVIDADQVVHKLQAKGGKLYQALLEWLGPEILDADGELDRPKLSQMIFANPDNMKTSARLQNSIIRQELACQRDQLKQTEEIFFMDIPLLIEEKYIKWFDEIWLVFVDKEKQLQRLMARNNYSREEAELRLSHQMPLTDKKSFASLIIDNNGDLITLKEQILDALQRL

SEQ ID NO: 10015 - DNA, 846 bp, Streptococcus agalactiae
atggaaaaagaattaggaaaaacactaagaagattacgtaaaggaaaaaaagttagtatttcttctttagcagatgagcacctatccaagtcacaaatctcaaggtttgagagaggagagtcagaaattacttgtagtcgtttgcttaatattttagacaaactcaacatcactattgatgaatttgtgtcgattcattctaaggcgcacactcatttttttatccttttaaatcgagtaagaaaatattgtgctgaaaaaaatgtaactaaattagtggctctcttagaggatcataaccataaagactatgaaaagattatgattaaggctcttattttttcaattgatcaatcaatagagcctaatcaagaagaattagcacgcttaacagactatctttttacggtggagcagtggggatattatgaaattattctcttaggaaattgctcacgtctcattaattacaatactttatttttattgaccaaagaaatggttaattcgtttgcttattcagaacaaaataaaaccaataaaatcctagttacacaattagcaattaattgtctaatcatcagcattgatcactcttactttgagcatagccactacttaattgataaggttagatcattgttacaggatgaagttaatttctatgaaaaaactgttttcttatatgtaactggatactatcatttaaaacttggtgatacttcttcaggaaaagaagatatgaggaaagctttacagatttttaaatatttaggtgaagattcattttacaatacttataatgaacattattgtcaaaaagtacttggcaataataaagaatgc

SEQ ID NO: 10016 - protein, 282 aa, Streptococcus agalactiae
MEKELGKTLRRLRKGKKVSISSLADEHLSKSQISRFERGESEITCSRLLNILDKLNITIDEFVSIHSKAHTHFFILLNRVRKYCAEKNVTKLVALLEDHNHKDYEKIMIKALIFSIDQSIEPNQEELARLTDYLFTVEQWGYYEIILLGNCSRLINYNTLFLLTKEMVNSFAYSEQNKTNKILVTQLAINCLIISIDHSYFEHSHYLIDKVRSLLQDEVNFYEKTVFLYVTGYYHLKLGDTSSGKEDMRKALQIFKYLGEDSFYNTYNEHYCQKVLGNNKEC

SEQ ID NO: 10017 - DNA, 897 bp, Streptococcus agalactiae
atgacatttaagtcaggatttgtagcaattttaggtcgtccaaatgttggaaaatcaaccttcctaaaccatgttatgggacaaaaaattgctatcatgagtgataaagctcaaacaacacgtaataaaattatggggatttatacaacagaaactgagcaaattgttttcattgataccccaggaattcataaaccaaagaccgcccttggtgattttatggttgaatctgcttatagtactttacgtgaagttgaaacagttcttttcatggttcctgccgatgaaaagcgaggcaaaggcgatgatatgattattgaacgtcttaaggctgccaagattcctgttattttagtaatcaacaaaattgataaggttcatccagaccaacttttggaacagattgatgacttccgtagtcaaatggattttaaagaagtagtgccaatttctgcccttcaaggaaataatgtgccaaccctaatcaagttattgactgataatcttgaagaaggtttccaatatttcccagaagatcagattactgatcatccggaacgatttttagtatcagaaatggttcgtgagaaggtacttcatttaacgcaacaagaggttcctcactcagtagctgttgttgtcgaatccatgaaacgtgatgaagaaactgataaagtgcatattcgtgcaactatcatggttgaacgtgatagtcaaaaaggcattatcattggaaaacaaggtgctatgctcaagaaaataggaaaaatggcgcgccgtgatattgaacttatgttaggtgataaagtttacctagagacttgggtaaaagtcaagaaaaactggcgtgataaaaagcttgatttagctgattttggctataatgaaaaagagtat

SEQ ID NO: 10018 - protein, 299 aa, Streptococcus agalactiae
MTFKSGFVAILGRPNVGKSTFLNHVMGQKIAIMSDKAQTTRNKIMGIYTTETEQIVFIDTPGIHKPKTALGDFMVESAYSTLREVETVLFMVPADEKRGKGDDMIIERLKAAKIPVILVINKIDKVHPDQLLEQIDDFRSQMDFKEVVPISALQGNNVPTLIKLLTDNLEEGFQYFPEDQITDHPERFLVSEMVREKVLHLTQQEVPHSVAVVVESMKRDEETDKVHIRATIMVERDSQKGIIIGKQGAMLKKIGKMARRDIELMLGDKVYLETWVKVKKNWRDKKLDLADFGYNEKEY

SEQ ID NO: 10019 - DNA, 483 bp, Streptococcus agalactiae
atgattgatgaaactggacaagtttcagaagatatcaaaaagcaaactcttgatttgttagagtttgcagcacaaaaaacaggtaaagagaataaagaaatggctgtaacgtttgtcactaatgaacgtagccatgaattgaatttagagtatcgagataccgatcgtccgactgatgttatcagtttagaatataagcctgaggttgatatttcttttgatgaagaagatctggctgaaaatcctgaacttgctgagatgctagaagattttgattcttatattggtgaactttttatttctattgataaagctaaagaacaagcagaagagtacggtcactcttatgaacgtgaaatgggttttttagctgtacatggttttttgcatattaacggttatgatcattatacacccgaagaagaaaaagagatgttcagcttacaggaagaaattttaactgcttatggacttaaacgacaa

SEQ ID NO: 10020 - protein, 161 aa, Streptococcus agalactiae
MIDETGQVSEDIKKQTLDLLEFAAQKTGKENKEMAVTFVTNERSHELNLEYRDTDRPTDVISLEYKPEVDISFDEEDLAENPELAEMLEDFDSYIGELFISIDKAKEQAEEYGHSYEREMGFLAVHGFLHINGYDHYTPEEEKEMFSLQEEILTAYGLKRQ

SEQ ID NO: 10021 - DNA, 507 bp, Streptococcus agalactiae
atggaacgtgcgatttttgctggaggttgtttttggtgtatggtacaaccatttgaagaattagatggtattgaatctgttttatctggatacactggaggacatgttgagaatccaacttataaagaagtttgtagtaaaactactggacatacagaagctgttgaaattatttttaatcctgaaaaaatctcttatgcagatttagttgagttatattgggcacaaacagatccaacagacgcttttggtcagtttgaagatcgtggggataattatcgtcctgtcatcttttatgagaatgaagagcaacgtcagattgctcaaaaatcaaaagataagctacaagcttcgggtagatttgatagaccaattgtaaccagcattgagcctgctgatactttttacccagcagaagactatcatcaagcattctatcggactaaccctgctcgttacgccttgagtagtgccagaagacatgcatttctagaggagaactggcat

SEQ ID NO: 10022 - protein, 169 aa, Streptococcus agalactiae
MERAIFAGGCFWCMVQPFEELDGIESVLSGYTGGHVENPTYKEVCSKTTGHTEAVEIIFNPEKISYADLVELYWAQTDPTDAFGQFEDRGDNYRPVIFYENEEQRQIAQKSKDKLQASGRFDRPIVTSIEPADTFYPAEDYHQAFYRTNPARYALSSARRHAFLEENWH

SEQ ID NO: 10023 - DNA, 852 bp, Streptococcus agalactiae
atgaatacattattagcgacagtcataacaggcttagtaactgatgaaaacaaagatttttactttatccaaaaagatggctttacctttgcattatcaaagtcagaaggagagcatcacattggtgaaatggttaaaggattcgcctatacagatatgcaacaaaaagcacgtcttacaactaaagaaacatttgcgactcgagatcattatggttgggggacagttactgaggtacgtaaagacttgggagtatttcttgatactggtcttccagataagcaagtggttgtttctttggatgttcttcctgaattgaaagaactttggcctaaaaaaggtgatcgcctctacgtttgcttagatgttgataaaaaagatcgtctctgggctctccctgcagatcctgaagtgtttcaacgaatggcaacccctgcatataacaatatgcaaaatcaaaattggccagcaatcgtttatcgcttaaaattgtcaggaacttttgtttatctaccagaaaataatatgctcggctttattcaccctagtgaacgttacagtgaacctcgtttagggcaagtgctggatgcacgagttattggcttcagagaagttgatagaaccttaaatttatcattaaagcctcgttcttttgaaatgttagaaaatgacgcacaaatgattttaacgtatttagaaagtaacggaggattcatgactttaaatgataaatcttctccagaggaaattaaagctacttttggaatttccaaaggtcagtttaaaaaagcacttggaggactcatgaaagctaaaaagatcaaacaagatcagctaggtacagaattatta

SEQ ID NO: 10024 - protein, 284 aa, Streptococcus agalactiae
MNTLLATVITGLVTDENKDFYFIQKDGFTFALSKSEGEHHIGEMVKGFAYTDMQQKARLTTKETFATRDHYGWGTVTEVRKDLGVFLDTGLPDKQVVVSLDVLPELKELWPKKGDRLYVCLDVDKKDRLWALPADPEVFQRMATPAYNNMQNQNWPAIVYRLKLSGTFVYLPENNMLGFIHPSERYSEPRLGQVLDARVIGFREVDRTLNLSLKPRSFEMLENDAQMILTYLESNGGFMTLNDKSSPEEIKATFGISKGQFKKALGGLMKAKKIKQDQLGTELL

SEQ ID NO: 10025 - DNA, 678 bp, Streptococcus agalactiae
atgttggtttgtaatcatgtcggaaaaacatttggacgacaagaggttttaaaggactgtcattttcatcttaaaagaggagaaataattggtataatgggtaaaagtggcagtggtaaaagtagccttgcccgactcattataggactagatagtcctacttgtggttcgatatattttcaaggaaaaatttacacacctaaagatggtaaggcgcagattatccttgtttttcaagatgcgcttagttcggtcaatccatattttagtattgaggaaattttgaatgaagctttttatggaaaaaaaacaacttttgaattatgtcaaatattagaagcggtgggtttagatggaacttatctaaaatataaagctagacaacttagtggtggtcagctacagagagtttgtatcgctagagctttactcttaaagcctaaaattattatttttgatgaatccttaagtggattagacccagtaactcaaattaaaatgctacgtttattacaaaaaataaaacgccgttatgaattaagttttataatgatttctcatgaccctaaaatttgtcaagctatctgtaaccgggtctttctgataaaaaatggttatttagtagaagataatgaattcttgaagagagcgtgttctactaactgtttgaccaatctc

SEQ ID NO: 10026 - protein, 226 aa, Streptococcus agalactiae
MLVCNHVGKTFGRQEVLKDCHFHLKRGEIIGIMGKSGSGKSSLARLIIGLDSPTCGSIYFQGKIYTPKDGKAQIILVFQDALSSVNPYFSIEEILNEAFYGKKTTFELCQILEAVGLDGTYLKYKARQLSGGQLQRVCIARALLLKPKIIIFDESLSGLDPVTQIKMLRLLQKIKRRYELSFIMISHDPKICQAICNRVFLIKNGYLVEDNEFLKRACSTNCLTNL

SEQ ID NO: 10027 - DNA, 705 bp, Streptococcus agalactiae
atgggagaatcgctaactattattggtgagagtggttcagggaaaaccctcttggcaaaattattggttggtcacattccacaaggtatgacagttagaggaaacatattttttaagggagttgatttaggtaaactaactgtaaagcagtggcagaaattaaggggacgagatattgcctatttagtgcaaaatcccatgtctatgtttaatccttttcaaaaaattgaagcgcatattttggaaacaatccttagtcatgagaaatgttcaaagagagtagccttatctaaagcgttagaatggatgaaacgtttaaatttagatgatgcgatatccctgttaaaaaaatacccttttgagcttagtggaggaatgctacaaagaattatgttagccactatattatctcttgatcctcaggtaatcatattagatgagccgacctcagcggttgattgtcataattgttctactatatcagctattttgcaggaattgcaaaataatggaaaaaccttgattactgtaacgcatgattatcagttagctagagacctggggggacaattattagttataagtgagggagaagttgttgaacagggacaaacccaagctattttaagcaatcctcaacataactatacgaaagcactgacagtgcaaatggagtatgaaggagatattcttaatgttggtttg

SEQ ID NO: 10028 - protein, 235 aa, Streptococcus agalactiae
MGESLTIIGESGSGKTLLAKLLVGHIPQGMTVRGNIFFKGVDLGKLTVKQWQKLRGRDIAYLVQNPMSMFNPFQKIEAHILETILSHEKCSKRVALSKALEWMKRLNLDDAISLLKKYPFELSGGMLQRIMLATILSLDPQVIILDEPTSAVDCHNCSTISAILQELQNNGKTLITVTHDYQLARDLGGQLLVISEGEVVEQGQTQAILSNPQHNYTKALTVQMEYEGDILNVGL

SEQ ID NO: 10029 - DNA, 1596 bp, Streptococcus agalactiae
ttgagcattacttgtttattgatggtgactctgactgcatgccattcacaggatagcaaaagtcataaactaaacagtgataaactcacgcttgcttggggagaagactttggtgatgttaatccgcatcgctataaccctgatcagtttgttatccaggatatggtttatgaggggttggtacgatatggtgacaatgggaaaattgaaccagctttagcgaaaagctggagcattagtcaagatggaaaaacctacacttttaaattgagaaatgctaaatattctgatggcagtaactttaatgctgcgaatgtcaaacgtaattttgatagtattttttcgaagtctaatagaggtaatcataattggtttaatttaacgaatcaattggaaaattatcgtgccttgaatcaaagtacttttgaaattaaactgaaacaagcttatagtgctactttatatgatctctctatgattcgaccaattcgctttttatctgatagcgctttccctaaaggtgatgatacaactaagaagaatgtaaaaaaaccaattggaacgggtcaatgggttgtgaaaagtaaaaagcaaaatgaatatattaccttcaaacgtaatgagaattactggggaaagaaaccaaaattaaaagaagtaaccgtaaaagttatacccgatgctcagacgcgtgctttagcattcgaatcaggtgacgttgatttgatctatgggaatggcattattggtttagacacttttgcccaatatacgaaggacaagaaatatgtcacagctatttctcaacctatgtcaacaagacttttgttgctaaatgctaaggaaagtattttccaagataaaaaagttcgtcaggcaatgaatcatgctattgacaaggtttctattgctaagaacacctttagaggaacagaaaagccagcagacactattttttcaaaatcaacatctcactcagatgctaagttaaatccttatagctataatgttgataaagcaaatcagctattggatcaagctggttggaagatgggaaaagataaggttcgtgaaaaagatggtaaaactctaaccttacgtcttccttatatcgccactaaggcaactgataaagacctggtaacttatttccaaggagaatggcgtaaaatcggtattaatgtttctcttattgctatggaagaagatgattattgggctaatgctaaaaagggtaattttgatatgatgttaacctattcttggggagcaccatgggaccctcatgcttggatgtcggcattaactgccaaggcagatcatggacatccagaaaatatagctttagaaaatctagcaactaaaactgaaatggatagacttattaagtcagctctagtagatcctaaggaagaaaatgttgatagagactataagaaggttcttgaattattgcatgatgaggctgtatatatcccattaacttatcaatcggtgatttctgtttataggaaaggtgattttaaaaccatgcgttttgcgccagaagaaaattcattcccattacgctatatagaaaaaaacaatgtatctaag

SEQ ID NO: 10030 - protein, 532 aa, Streptococcus agalactiae
MSITCLLMVTLTACHSQDSKSHKLNSDKLTLAWGEDFGDVNPHRYNPDQFVIQDMVYEGLVRYGDNGKIEPALAKSWSISQDGKTYTFKLRNAKYSDGSNFNAANVKRNFDSIFSKSNRGNHNWFNLTNQLENYRALNQSTFEIKLKQAYSATLYDLSMIRPIRFLSDSAFPKGDDTTKKNVKKPIGTGQWVVKSKKQNEYITFKRNENYWGKKPKLKEVTVKVIPDAQTRALAFESGDVDLIYGNGIIGLDTFAQYTKDKKYVTAISQPMSTRLLLLNAKESIFQDKKVRQAMNHAIDKVSIAKNTFRGTEKPADTIFSKSTSHSDAKLNPYSYNVDKANQLLDQAGWKMGKDKVREKDGKTLTLRLPYIATKATDKDLVTYFQGEWRKIGINVSLIAMEEDDYWANAKKGNFDMMLTYSWGAPWDPHAWMSALTAKADHGHPENIALENLATKTEMDRLIKSALVDPKEENVDRDYKKVLELLHDEAVYIPLTYQSVISVYRKGDFKTMRFAPEENSFPLRYIEKNNVSK

SEQ ID NO: 10031 - DNA, 1164 bp, Streptococcus agalactiae
atgacaaaacacaaacacctaactctcttagaccgtaatgacatccaatctggtttggatagaggagaaacctttaaagccatcgggcttaatctactgaaacaccctactactatcgcaaaagaagtcaaacgaaataagcaactaagagaatcaaccaaagactgcctagactgtccgctactaagaaaagctccctatgtttgtaatgggtgtccaaagaggaggatcaactgtggttacaagaagaccttctatcttgctaagcaagctcaaagaaactatgaaaaacttttagttgaatctagagaaggaatccctttgaacaaagagaccttctggaaaatagatagagtgctttctaatggggtcaagaagggccaacgtatctatcatatcctcaaaaccaacgatctagaagtgagttcttcaaccgtttatcgacacatcaagaaaggctacctatccatcacaccaatcgacctacccagagctgtgaagttcaaaaaaaggcgaaagagcacactccctcctattccaaaagcgattaaagaagggcgacggtacgaggattttatagaacacatgaaccaatcagagctgaactcctggcttgaaatggacacggttattggacggattggtggaaaggtccttctcaccttcaatgtcgccttctgtaacttcatctttgccaaactgatggattctaagacagctatcgaaactgctaaacacatacaggtcattaagaggacactctatgataacaagagagacttcttcgaactctttcctgttatcctaacggataatggtggggaattcgctagagtggatgatattgagatagatgtttgtggacagtctcaactcttcttttgtgaccctaatcggtctgaccagaaagcaagaatcgagaagaatcataccctcgtgagagacatactgcctaaggggacttccttcgacaacttgactcaagaggacattaatctggcactatctcatatcaacagcgttaagagacaggctctaaatggtaaaacggcttatgagctattctcttttacttacggaaaagacatcgcaagtatactcggtattgaggaaattactgcggaagacgtctgccaatctcccaaactattaaaagacaaaatc

SEQ ID NO: 10032 - protein, 388 aa, Streptococcus agalactiae
MTKHKHLTLLDRNDIQSGLDRGETFKAIGLNLLKHPTTIAKEVKRNKQLRESTKDCLDCPLLRKAPYVCNGCPKRRINCGYKKTFYLAKQAQRNYEKLLVESREGIPLNKETFWKIDRVLSNGVKKGQRIYHILKTNDLEVSSSTVYRHIKKGYLSITPIDLPRAVKFKKRRKSTLPPIPKAIKEGRRYEDFIEHMNQSELNSWLEMDTVIGRIGGKVLLTFNVAFCNFIFAKLMDSKTAIETAKHIQVIKRTLYDNKRDFFELFPVILTDNGGEFARVDDIEIDVCGQSQLFFCDPNRSDQKARIEKNHTLVRDILPKGTSFDNLTQEDINLALSHINSVKRQALNGKTAYELFSFTYGKDIASILGIEEITAEDVCQSPKLLKDKI

SEQ ID NO: 10033 - DNA, 882 bp, Streptococcus agalactiae
atgtatctagagagtatcgagctatactcaaacatcactaaagccgctgcacacctttttatttctcaaccttacctaagcaaagtgatcaagcaattagaaaatgagttagaaataaaactcatccagagccaaggacaccaaacctttttaacttatgctggacagagatatctattctacctaaaagaaattgatatgattgagcgtcaaatggccaaagaactatatctcatccgttctgataaaaaaggagaaatcacacttgggattaactctggcttagcaagttctattctggcaaatgtacttcccaaatttaacttggagcacccagaaatttctgtcaaattactcgaaaacaatcaaaatatttctgaacaattggtagcgagtggtgatattgacctagctgttgggatggctcctatcctttataaagatggaattgcatcaaccactatttaccgcgacgaattgtttttaatgatacctaccaccagccaactctacaacgctgaaaaacgtggacagattattccttttgaatatcctatttcagttctagacaatgaacctcttatcctaacaccattagagtacggaattggcaaaacaattgcacaattctatgagcttcatcacatgtcattaaatcagatgattacaactagtaccgttcctacagcagctagcctatctttgtcagggatgggagcaacatttgttccacaaactctcattcatcgctatttggataaagagtgcaatgtctaccattttcataagaataagttattttcagagtacattatgatttataaaaaagatgttgaattatctggaattgctctcctactttataaagcttttttaaccaag

SEQ ID NO: 10034 - protein, 294 aa, Streptococcus agalactiae
MYLESIELYSNITKAAAHLFISQPYLSKVIKQLENELEIKLIQSQGHQTFLTYAGQRYLFYLKEIDMIERQMAKELYLIRSDKKGEITLGINSGLASSILANVLPKFNLEHPEISVKLLENNQNISEQLVASGDIDLAVGMAPILYKDGIASTTIYRDELFLMIPTTSQLYNAEKRGQIIPFEYPISVLDNEPLILTPLEYGIGKTIAQFYELHHMSLNQMITTSTVPTAASLSLSGMGATFVPQTLIHRYLDKECNVYHFHKNKLFSEYIMIYKKDVELSGIALLLYKAFLTK

SEQ ID NO: 10035 - DNA, 2355 bp, Streptococcus agalactiae
atgattactgctcttgttttaacaattattctcttctttggtattatcagattaggtatttttggtattacagtctataacgtcatccgttttatggtaggtagcttggcttacttatttattgcggcaactttaatctacctttatttctttaaatggttgcgaaagaaagatagcttagtagcaggttttttgatagcttctttaggattattgattgagtggcatgcttaccttttctcaatgcctattttgaaagataaagaaattttgcgttcaactgctcgattaattgtgtctgatttaatgcaatttaaaatcactgtttttgccggtggaggtatgttgggtgctttgatttacaagccaattgcttttctcttttctaatattggtgcctatatgattggtgttctcttcatcattttgggtctctttttaatgagttctctggaagtttatgacatcgtcgaatttattagagcttttaaaaataaagtggcagagaagcacgagcaaaataaaaaggagcgttttgctaagcgagagatgaaaaaagcaatcgctgaacaagagcgcatagagcgtcaaaaagctgaagaagaagcttatttagcttcggttaatgtagaccctgaaacgggtgagattctagaggatcaagctgaggacaatttggatgatgcgctaccacctgaggtaagtgaaacatcaactccggtatttgagccagagatccttgcttatgagacatcgcctcaaaatgatcctttaccagtagagccgacaatttatttagaagactatgattcgccgattcctaatatgagagaaaatgatgaggaaatggtttatgatttagatgatgatgtagatgatagtgatatagaaaatgtcgactttacacctaaaacgacactggtttataaattaccaacgatagatttatttgcaccagataagcctaaaaatcaatccaaagaaaaggatttagtccgaaagaatatcagagttttagaagaaacatttagaagttttggtatcgatgtaaaagtagaacgtgctgaaattggaccatcagttactaaatatgaaattaaaccagcagttggagttcgtgtgaatcgtatttcaaatctatctgacgacctagctcttgctcttgcagcaaaagatgtgcgtatagaaacaccaattcctggaaaatcattaataggtattgaagttcctaactcagaaattgcaacggtttctttccgcgaactttgggaacaatctgatgccaatcctgaaaaccttttagaagtaccactaggaaaagctgttaacggcaatgctcgcagttttaacttagctagaatgccgcatcttttggtagctggttcaactggttcaggtaaatctgtggcagttaatggaattatttcaagtattttgatgaaggcacgtccagatcaagttaagtttatgatgattgatcccaaaatggttgaattatctgtttataatgatattccacatttattaatccctgttgtaaccaatccgcgtaaagcaagtaaggcactccaaaaagttgttgatgaaatggaaaatcgatacgagttatttagcaaaattggtgtgcgtaatatagcaggttataatacaaaggttgaagagtttaatgcttcctctgagcaaaaacaaatacctttgcctttaatcgttgtcattgtagatgaattggctgacttgatgatggttgctagtaaagaagttgaagatgctattattcgtttggggcaaaaagcacgtgctgcaggtatccatatgattcttgcaactcaacgtccatccgtagatgttatttctggtttgattaaagcaaatgttccgtcgcgtattgcatttgctgtttcaagtggtactgatagccgtacgatccttgatgaaaatggtgctgaaaagctcttgggacggggtgacatgctctttaagcctattgatgagaatcatccagtacgactacaaggttcctttatttcagatgatgatgttgaaaggatcgttggttttatcaaagaccaagccgaggctgactatgatgatgcctttgatcctggagaagtatctgaaacagataacggctctggtggtggcggcggagtacctgaaagtgatcctctttttgaagaagccaagggactcgttttagagacgcaaaaagcaagtgcctcaatgattcaacgccgattgtctgttggtttcaatagagcaacaagactaatggaagaattagaagcagcgggggttattggtccagcagaaggaaccaagccacgaaaagttttaatgactccaactccgagtgaa

SEQ ID NO: 10036 - protein, 785 aa, Streptococcus agalactiae
MITALVLTIILFFGIIRLGIFGITVYNVIRFMVGSLAYLFIAATLIYLYFFKWLRKKDSLVAGFLIASLGLLIEWHAYLFSMPILKDKEILRSTARLIVSDLMQFKITVFAGGGMLGALIYKPIAFLFSNIGAYMIGVLFIILGLFLMSSLEVYDIVEFIRAFKNKVAEKHEQNKKERFAKREMKKAIAEQERIERQKAEEEAYLASVNVDPETGEILEDQAEDNLDDALPPEVSETSTPVFEPEILAYETSPQNDPLPVEPTIYLEDYDSPIPNMRENDEEMVYDLDDDVDDSDIENVDFTPKTTLVYKLPTIDLFAPDKPKNQSKEKDLVRKNIRVLEETFRSFGIDVKVERAEIGPSVTKYEIKPAVGVRVNRISNLSDDLALALAAKDVRIETPIPGKSLIGIEVPNSEIATVSFRELWEQSDANPENLLEVPLGKAVNGNARSFNLARMPHLLVAGSTGSGKSVAVNGIISSILMKARPDQVKFMMIDPKMVELSVYNDIPHLLIPVVTNPRKASKALQKVVDEMENRYELFSKIGVRNIAGYNTKVEEFNASSEQKQIPLPLIVVIVDELADLMMVASKEVEDAIIRLGQKARAAGIHMILATQRPSVDVISGLIKANVPSRIAFAVSSGTDSRTILDENGAEKLLGRGDMLFKPIDENHPVRLQGSFISDDDVERIVGFIKDQAEADYDDAFDPGEVSETDNGSGGGGGVPESDPLFEEAKGLVLETQKASASMIQRRLSVGFNRATRLMEELEAAGVIGPAEGTKPRKVLMTPTPSE

SEQ ID NO: 10037 - DNA, 234 bp, Streptococcus agalactiae
atgacatttgaagaaattttaccaggtttaaaagcaaagaaaaaatatgtacgtacaggttgggggggcgctgaaaattatgttcagttatttgatacccttgaagttaatgggaaagtactacaggctacaccttattttcttattaatgttactggtgaaggtgaaggtttttccatgtgggcaccaacaccatgtgatgttttagcagaggattggatcgaggtcaatgac

SEQ ID NO: 10038 - protein, 78 aa, Streptococcus agalactiae
MTFEEILPGLKAKKKYVRTGWGGAENYVQLFDTLEVNGKVLQATPYFLINVTGEGEGFSMWAPTPCDVLAEDWIEVND

SEQ ID NO: 10039 - DNA, 1203 bp, Streptococcus agalactiae
gtgagttcgattgattcgttattgcaccttgattatgaagcgtatgaaattatcgttgtggatgacggttccagtgacaatacttcagatgttctcaaggaagagtttgcattaatgaaaatctcgaatacgattgattcaattattgctactcaaacttgtaaagatgtctttcagagacaggttggtaaggttaaactgacactcattgttaaagaaaatggtggcaaaggggatgccttaaatatggggatcaatgctgctaattacgattattttctatgtctagatgcagattctatgttgcaggtagattctttgagtcaaattagcaaatccatacaggtagatccgacggttatagcagtgggagggctcgtccaagttgcccaaggtgttaagattgagcaggggaaagtagcatcttatcgtttgccttggagaattattccttgtgcacaagcacttgagtatgattcatcatttttaggagctcgaatctttttagactatttaagagctaatttaattatttcgggggctttcggtctttttaagaaagaccttgttaaagcggtgggaggatatgacacccagactctaggagaagatatggagttggtgatgaaattacatttcttctgtcgtaataataatattccttatcgtatttgttatgaaacagatgctgtttgttggagtcaagcaccaacgaatttaggggatttacgtaaacagagacgccgatggtatcttggcttgtaccaatgtttaaaaaaatataaaagtatttttgccaattatcgctttggagctgtaggatcaatttcttatatttactatattttatttgaattactgaccccttttatagaatgttttggtattgtcattatatttttgtccttattatttaatcaattaaacatcccattctttatatcattggtgagcctttatatcttttactgtgttttaattacattaagctctttcttacaccgtatttattctcagcaactagtaataggaattttagatattgttaaagtattttatattgctgtttttaggtatcttatcctacatcctgtattaacttttgttaaggttgcaagtgttattggctataaaaataaaaaaatggtttgggggcatattacgagagagaaacaaatgaaggattttgaaacaagtgttact

SEQ ID NO: 10040 - protein, 401 aa, Streptococcus agalactiae
MSSIDSLLHLDYEAYEIIVVDDGSSDNTSDVLKEEFALMKISNTIDSIIATQTCKDVFQRQVGKVKLTLIVKENGGKGDALNMGINAANYDYFLCLDADSMLQVDSLSQISKSIQVDPTVIAVGGLVQVAQGVKIEQGKVASYRLPWRIIPCAQALEYDSSFLGARIFLDYLRANLIISGAFGLFKKDLVKAVGGYDTQTLGEDMELVMKLHFFCRNNNIPYRICYETDAVCWSQAPTNLGDLRKQRRRWYLGLYQCLKKYKSIFANYRFGAVGSISYIYYILFELLTPFIECFGIVIIFLSLLFNQLNIPFFISLVSLYIFYCVLITLSSFLHRIYSQQLVIGILDIVKVFYIAVFRYLILHPVLTFVKVASVIGYKNKKMVWGHITREKQMKDFETSVT

SEQ ID NO: 10041 - DNA, 693 bp, Streptococcus agalactiae
atgaacgaagttcttagacaggaaaaaaaatatttaatatcacttgaagattactatcttttatctaagaaattttcccaagtaatgacgctcgattcgcatagttcagacgacggctatactatccgttcgctatactttgattctttagaagatgttgattggcaagaaaaggaagatggtgttgagatacgaagaaagattcgtttgcgcaattatggtagtcaaagcaattttgcgaaattagaaatgaaacaaaaacaaggtgctaatcaaaaaaagcgctctctaaaattaagcaagacagatgctcaagcgctgattaatggtaacaatagtgttttattaaattatccggatacatttgctgcggagtgttattcaaggataacaacgcaactttatcaacctaaaacggttattgagtaccaaagaaaagcttttgttgctaaggaaaacaatatccgaatcacctttgaccaccatataataggtacagaggctagttatgatattttctcagaggatttaaatcaaaattatttattagatccttatcttgttattttagaagttaaatataatggatttttattgtcttatattaaagaactcttagattcggtagatagaagtgaactttcagcgagtaagtattgtttaggaagagctgttagtaaacattatcgtttt

SEQ ID NO: 10042 - protein, 231 aa, Streptococcus agalactiae
MNEVLRQEKKYLISLEDYYLLSKKFSQVMTLDSHSSDDGYTIRSLYFDSLEDVDWQEKEDGVEIRRKIRLRNYGSQSNFAKLEMKQKQGANQKKRSLKLSKTDAQALINGNNSVLLNYPDTFAAECYSRITTQLYQPKTVIEYQRKAFVAKENNIRITFDHHIIGTEASYDIFSEDLNQNYLLDPYLVILEVKYNGFLLSYIKELLDSVDRSELSASKYCLGRAVSKHYRF

SEQ ID NO: 10043 - DNA, 1995 bp, Streptococcus agalactiae
atgacagaaaaaaaatcattttacattactaccccaatttattacccatcaggtaaattgcacatcggttctgcctatacaacgatagcatgtgatgttttggcacgttacaaacgcatgatgggctttgatgttcagtatttgactggtcttgatgagcatggtcagaaaattcaacaaaaggctgaagaagcaggcattacaccacaggaatatgttgatggcatggctgaaagtgtcaaaacattatgggaacttttagatatttcctatgacaaattcatccgtacaacagatacttaccatgaagaagcggttgctaaaatttttgaacaattgttggcacaaggggacatctatcttggtgagtataccggatggtattctgtttcagatgaagaattttttactgaaagccaattagcagaagtttatcgtgacgaaaacggtaatatgattggtggtgttgcgccatctggtcatgaagttgaaaaagtttctgaagaatcttatttcttccgcatgagcaaatatgcagatcgtttaaaagcgtactacgctgagcatccagaatttattcagccagatggtcgtatgaatgaaatgcttaaaaactttatagaaccaggtttagaagatttagcagtgtctcgtacaacttacacatggggagttcaggtaccatcaaatccaaaacatgttatttatgtctggattgatgctttgatgaactatatttctgctcttggttatggttggtctgacgatctcagtcaatatcataaattttggccagcagacattcatatgattggtaaagatattcttcgtttccactctatttattggcctatcatgttgatggcgctggatttgccattaccaaaacgtctagttgctcatggttggtttgtgatgcaagatggtaaaatgtctaaatcaaaagggaatgtcgtttatccagaaatgttagtagagcgttttggtcttgatccactccgttattatctcatgcgttcattgcctgttggttcagacggaacttttacgccagaagattatgttggacgtattaactatgaacttgctaatgatttaggaaaccttctcaaccgcactattgctatggttaacaagtatttcgatggagaagtaccaaggtttgctgttgcaactgactttgatgccgatttagcttctgttgcgacagatagtattgaaaactatcataaacaaatggaagcggtggatttcccacgtgcccttgaagctgtatggaatcttatttcacgaactaacaaatatattgatgaaacagcaccgtgggtacttgcaaaagacgaaacagatcgtgataagttagcagctgtaatgagtcatttagttgctagtctacgtgttgttgctcacctcattcaaccgttcatgatggaaacttccgatgccattatggaacaacttggtttaggggcaacattcgatcttgaaaaattgacttttgctgatctaccagaaggtgttcgagttgttgcaaaaggttcaccaattttcccaaggttggatatggaagacgaaattacttatatcaaagaacaaatgaatgctggaaaagcaccagtggaaaaggagtgggttcctgaagaagttgaattgacatcaagcaaaggtcaaatcaagtttgaggattttgacgctgttgaaatccgcgttgcagaagtaattgaagttgagaaagtggaaggttctgataaacttcttcgtttccgtctagatgctggtgatgagggccatcgtcaaatcttatcagggattgcaaaattttacccaaatgaacaagagttagtagggaaaaaactccaaattgttgctaacctcaaaccacgtaaaatgatgaaaaaatatgtcagtcaaggcatgattctctcagcagaacatgatggtaaattgacagtgttgacggtcgattcagcagtggcaaatggatcaattattggt

SEQ ID NO: 10044 - protein, 665 aa, Streptococcus agalactiae
MTEKKSFYITTPIYYPSGKLHIGSAYTTIACDVLARYKRMMGFDVQYLTGLDEHGQKIQQKAEEAGITPQEYVDGMAESVKTLWELLDISYDKFIRTTDTYHEEAVAKIFEQLLAQGDIYLGEYTGWYSVSDEEFFTESQLAEVYRDENGNMIGGVAPSGHEVEKVSEESYFFRMSKYADRLKAYYAEHPEFIQPDGRMNEMLKNFIEPGLEDLAVSRTTYTWGVQVPSNPKHVIYVWIDALMNYISALGYGWSDDLSQYHKFWPADIHMIGKDILRFHSIYWPIMLMALDLPLPKRLVAHGWFVMQDGKMSKSKGNVVYPEMLVERFGLDPLRYYLMRSLPVGSDGTFTPEDYVGRINYELANDLGNLLNRTIAMVNKYFDGEVPRFAVATDFDADLASVATDSIENYHKQMEAVDFPRALEAVWNLISRTNKYIDETAPWVLAKDETDRDKLAAVMSHLVASLRVVAHLIQPFMMETSDAIMEQLGLGATFDLEKLTFADLPEGVRVVAKGSPIFPRLDMEDEITYIKEQMNAGKAPVEKEWVPEEVELTSSKGQIKFEDFDAVEIRVAEVIEVEKVEGSDKLLRFRLDAGDEGHRQILSGIAKFYPNEQELVGKKLQIVANLKPRKMMKKYVSQGMILSAEHDGKLTVLTVDSAVANGSIIG

SEQ ID NO: 10045 - DNA, 1095 bp, Streptococcus agalactiae
atgtcagaaaatcctgatgcctatattattcgtagtcaaaatttgcataatcaggatttcccaagtaacctcaaagctattgctagggcgggtgcaggaacaaataatattcctattgaagaggcaagtgcacagggaatagtcgtgtttaataccccaggtgcaaatgctaatgctgtaaaagaagcggtcattgctgccttattactttcagctcgtgattatttaggagctaaccgatgggttaatactctaactggaacagatattcccaaacaaattgaagcaggaaagaaagcttttgctggtaatgaaattgcaggaaaaaaattgggagttatcggccttggtgccattggagctagaattgcgaatgatgctagacgcttaggaatgacagttcttggttatgatccctatgtttcaattgaaacagcttggaatatttcaagccatgttcaaagggttaaagagattaaggatatttttgaaacttgtgactatatcacaattcatgttcccttaacaaatgaaactaagcatacttttgatgcgaaagctttttcaatcatgaaaaaaggaactacgattatcaactttgctcgtgcagaattagtcaataaccaagagctatttgaagcgatagaaactggtgttgtcaagcgctatattactgattttggagacaaagaattattaaaccaaaaaggaattacagtctttcctcatgtaggcggatcaacagatgaggcagagctaaattgtgctattatggcaagtcaaaccattcgttgttttatggagacaggagaaatcactaattcagttaatttccccaatgtacatcaaattcaaaccgcaccatttcgtattactttaattaacaagaatgttcctaacattgtggctaaaatttcaactgctgtatcagagttaggtataaatattgataacattattaaccgttcaaagggtgactacgcctacacactaatagatttagatgaaacggataataacaagatttctactttaattgaagaatttgaaggtgatgagaatatcgtccgtgtacgtttaattgcaaaacaacaa

SEQ ID NO: 10046 - protein, 365 aa, Streptococcus agalactiae
MSENPDAYIIRSQNLHNQDFPSNLKAIARAGAGTNNIPIEEASAQGIVVFNTPGANANAVKEAVIAALLLSARDYLGANRWVNTLTGTDIPKQIEAGKKAFAGNEIAGKKLGVIGLGAIGARIANDARRLGMTVLGYDPYVSIETAWNISSHVQRVKEIKDIFETCDYITIHVPLTNETKHTFDAKAFSIMKKGTTIINFARAELVNNQELFEAIETGVVKRYITDFGDKELLNQKGITVFPHVGGSTDEAELNCAIMASQTIRCFMETGEITNSVNFPNVHQIQTAPFRITLINKNVPNIVAKISTAVSELGINIDNIINRSKGDYAYTLIDLDETDNNKISTLIEEFEGDENIVRVRLIAKQQ

SEQ ID NO: 10047 - DNA, 546 bp, Streptococcus agalactiae
atgcaaatcagattagcttttccaaatgaaattgaccaaattatgcttcttattgaggaagcgcgtgccgaaattgctaaaacaggaagtgatcaatggcaaaaagaagatggataccctaatcgtaacgatattattgatgatatcttgaacggttatgcttgggttggtattgaagatgggatgctagcgacttatgcggctgtcattgatggtcatgaagaggtttatgatgctatttatgagggaaaatggctccatgataaccatcgctatcttacatttcatcgtattgcgatctcaaatcaatttcgtggtagaggactagcacagacattccttcaagggttaattgaaggtcataaaggacctgattttcgttgcgatactcatgaaaaaaatgtcactatgcagcatattctaaataaattaggctatcaatattgtggtaaagtacctctagatggggtacgattggcttatcagaagataaaagaaaagggagaaacgagcatctatcgtgagattgatgaaagaaatcccatg

SEQ ID NO: 10048 - protein, 182 aa, Streptococcus agalactiae
MQIRLAFPNEIDQIMLLIEEARAEIAKTGSDQWQKEDGYPNRNDIIDDILNGYAWVGIEDGMLATYAAVIDGHEEVYDAIYEGKWLHDNHRYLTFHRIAISNQFRGRGLAQTFLQGLIEGHKGPDFRCDTHEKNVTMQHILNKLGYQYCGKVPLDGVRLAYQKIKEKGETSIYREIDERNPM

SEQ ID NO: 10049 - DNA, 516 bp, Streptococcus agalactiae
atgatttatgcaggagctcaaaaaaatattggacctgctggtgtaacggtagttattatccgtgaagatatgattaatgaggaaccaactttatcatcaatgttggattataagattcagtcagatgctggttctctttataatacgccgcctgcttacagtatttacattgctaaattagtctttgaatgggtgaaaagtctaggtggtgttgatgctatggaaaaagctaatcgtgaaaaatcaggacttctctatgattatattgattcctcagaattttatagtaatcctgtcagagataaaaagagtcgttctctatgtaacattcctttcataactattaataaagatttagatgaaaaatttgtaaaggaagcgacagaacgtggatttaaaaatattaaaggacatcgttcggtaggtggtatgagagctagcctttataatgcctttcctaaacaaggtgtcatcgaattaattgattttatgaaaacatttgaagcagaaaataca

SEQ ID NO: 10050 - protein, 172 aa, Streptococcus agalactiae
MIYAGAQKNIGPAGVTVVIIREDMINEEPTLSSMLDYKIQSDAGSLYNTPPAYSIYIAKLVFEWVKSLGGVDAMEKANREKSGLLYDYIDSSEFYSNPVRDKKSRSLCNIPFITINKDLDEKFVKEATERGFKNIKGHRSVGGMRASLYNAFPKQGVIELIDFMKTFEAENT

SEQ ID NO: 10051 - DNA, 861 bp, Streptococcus agalactiae
atgcaagttcaaaaaagttttaaatcaaatatacattacggaacactctatctagtcccaactccaattggtaatctagatgatatgacttttcgtgccattaggattttaagagaagttgattttatttgtgcagaggatacacgaaatacgggacttttactcaagcactttgatattactactaaacaaattagttttcacgaacacaatgcttacgataaaatctctgggttaattgatttgttaaaagaagggaaatctttagcccaagtatctgatgcaggaatgccctctatttctgacccaggacatgaccttgtcaaggctgctattgaaggggatatcccagttgtatctataccaggagctagcgctggtattactgctctcatcgcttcaggtttagctccacaacctcatattttttatggcttcttacctcgtaagaaaggtcaacaaataactttctttgaaacaaagcaagattaccctgaaacacaaatcttttatgagtcaccgtttcgagtctctgatacgctaaaacacatgaaagagatttacggagatcgccaagttgttttagtacgcgaattgacgaaactctatgaagagtatcaaagaggaaccattagtcaacttttagagcatattgaaaaggtccctctcaaaggtgaatgcttaattattgttgatggtaagagagataccgagcgagtgaaagacagtagccaacaagatccactagtattagtaaaagaatatatcgctaatggtgataaaactaatcaagcgataaaaaaagtagcaaaagaatttaatctcaatagacaagaactctatgctagtttccatgattta

SEQ ID NO: 10052 - protein, 287 aa, Streptococcus agalactiae
MQVQKSFKSNIHYGTLYLVPTPIGNLDDMTFRAIRILREVDFICAEDTRNTGLLLKHFDITTKQISFHEHNAYDKISGLIDLLKEGKSLAQVSDAGMPSISDPGHDLVKAAIEGDIPVVSIPGASAGITALIASGLAPQPHIFYGFLPRKKGQQITFFETKQDYPETQIFYESPFRVSDTLKHMKEIYGDRQVVLVRELTKLYEEYQRGTISQLLEHIEKVPLKGECLIIVDGKRDTERVKDSSQQDPLVLVKEYIANGDKTNQAIKKVAKEFNLNRQELYASFHDL

SEQ ID NO: 10053 - DNA, 633 bp, Streptococcus agalactiae
atgaaaaaaggactaatgatttcttttgagggcccagatggtgcgggtaaaacaaccgttttagaagctgttttacccttgctcagagaaaaattatcacaagatattctcaccaccagagagcctggtggcgtaactatttcagaagaaattcgtcatattattttagatgttaaacacacgcaaatggataaaaaaacagagctattgctttacatggctgctcgacgccaacatctagtggaaaaggtactcccagctctagaagaagggaaaatagtcctaatggatcgttttattgatagttctgttgcctatcagggatcaggaagaggattagataagtcacatataaaatggcttaatgactatgcgactgatagtcataaacctgatttaactttatattttgatgttccttctgaagtaggtttagagcgtattcaaaaaagtgttcaaagggaggtaaatcgtctagatctcgagcaattagatatgcatcaacgcgtccgtcaaggttaccttgaattggcggattcggagccaaaccgcattgtgacgattgatgcctcccaacagctagatgaagtaatagctgagacattctctattattttagatcgtatcaaccaa

SEQ ID NO: 10054 - protein, 211 aa, Streptococcus agalactiae
MKKGLMISFEGPDGAGKTTVLEAVLPLLREKLSQDILTTREPGGVTISEEIRHIILDVKHTQMDKKTELLLYMAARRQHLVEKVLPALEEGKIVLMDRFIDSSVAYQGSGRGLDKSHIKWLNDYATDSHKPDLTLYFDVPSEVGLERIQKSVQREVNRLDLEQLDMHQRVRQGYLELADSEPNRIVTIDASQQLDEVIAETFSIILDRINQ

SEQ ID NO: 10055 - DNA, 549 bp, Streptococcus agalactiae
atgacaaaacacaaacacctaactctcttagaccgtaatgacatccaatctggtttggatagaggagaaacctttaaagccatcgggcttaatctactgaaacaccctactactatcgcaaaagaagtcaaacgaaataagcaactaagagaatcaaccaaagactgcctagactgtccgctactaagaaaagctccctatgtttgtaatgggtgtccaaagaggaggatcaactgtggttacaagaagaccttctatcttgctaagcaagctcaaagaaactatgaaaaacttttagttgaatctagagaaggaatccctttgaacaaagagaccttctggaaaatagatagagtgctttctaatgggggtcaagaagggccaacgtatctatcatatcctcaaaaccaacgatctagaagtgagttcttcaaccgtttatcgacacatcaagaaaggctacctatccatcacaccaatcgacctacccagagctgtgaagttcaaaaaaaggcgaaagagcacactccctcctattccaaaagcgat

SEQ ID NO: 10056 - protein, 183 aa, Streptococcus agalactiae
MTKHKHLTLLDRNDIQSGLDRGETFKAIGLNLLKHPTTIAKEVKRNKQLRESTKDCLDCPLLRKAPYVCNGCPKRRINCGYKKTFYLAKQAQRNYEKLLVESREGIPLNKETFWKIDRVLSNGGQEGPTYLSYPQNQRSRSEFFNRLSTHQERLPIHHTNRPTQSCEVQKKAKEHTPSYSKSD

SEQ ID NO: 10057 - DNA, 744 bp, Streptococcus agalactiae
gtgagttcttcaaccgtttatcgacacatcaagaaaggctacctatccatcacaccaatcgacctacccagagctgtgaagttcaaaaaaaggcgaaagagcacactccctcctattccaaaagcgattaaagaagggcgacggtacgaggattttatagaacacatgaaccaatcagagctgaactcctggcttgaaatggacacggttattggacggattggtggaaaggtccttctcaccttcaatgtcgccttctgtaacttcatctttgccaaactgatggattctaagacagctatcgaaactgctaaacacatacaggtcattaagaggacactctatgataacaagagagacttcttcgaactctttcctgttatcctaacggataatggtggggaattcgctagagtggatgatattgagatagatgtttgtggacagtctcaactcttcttttgtgaccctaatcggtctgaccagaaagcaagaatcgagaagaatcataccctcgtgagagacatactgcctaaggggacttccttcgacaacttgactcaagaggacattaatctggcactatctcatatcaacagcgttaagagacaggctctaaatggtaaaacggcttatgagctattctcttttacttacggaaaagacatcgcaagtatactcggtattgaggaaattactgcggaagacgtctgccaatctcccaaactattaaaagacaaaatc

SEQ ID NO: 10058 - protein, 248 aa, Streptococcus agalactiae
MSSSTVYRHIKKGYLSITPIDLPRAVKFKKRRKSTLPPIPKAIKEGRRYEDFIEHMNQSELNSWLEMDTVIGRIGGKVLLTFNVAFCNFIFAKLMDSKTAIETAKHIQVIKRTLYDNKRDFFELFPVILTDNGGEFARVDDIEIDVCGQSQLFFCDPNRSDQKARIEKNHTLVRDILPKGTSFDNLTQEDINLALSHINSVKRQALNGKTAYELFSFTYGKDIASILGIEEITAEDVCQSPKLLKDKI

SEQ ID NO: 10059 - DNA, 798 bp, Streptococcus agalactiae
atggtatatggcattattaagctgattaattttgctcatggggacatctatatgatgggcgctttcatgggctattatttgattaatcatcttcatcttaattttttcctagctttattaattgcaatgctggggtctgctttcctaggtgttgtaattgaatatttagcttatcgtccactgagaaaatcaactagaattgccgcgttaattacagctattggtgtttcttttcttttggagtacgggatggtataccttgttggagcggatactagggcatttccgcaagccattcatactgttaaatataatttaggaccgataactataaccaatgttcagctcatcattttaggtattgcgctattactaatgcttactttacagttcatcgttcaaaaaactaaaatggggaaagctatgagagctttatcagtggatagcgatgccgcacaattgatgggaattaatgttaaccgtaccattagttttacatttgcgctggggtctgctttagctggagcaggtggagtactgattgggctttattataattctgttcaacctcttatgggggtaactccagggttgaaagcatttgttgcagctgtcttaggtggtattggtatcattccgggagcggctatcggtggttttgttattggcattttagaaactttagcgactgcacttggtgtgtcagattttcgagatggtatcgtttatgctattttaattctcattttcttgatccgtccagcaggaattcttggaaaaaatattaaggagaaggtc

SEQ ID NO: 10060 - protein, 266 aa, Streptococcus agalactiae
MVYGIIKLINFAHGDIYMMGAFMGYYLINHLHLNFFLALLIAMLGSAFLGVVIEYLAYRPLRKSTRIAALITAIGVSFLLEYGMVYLVGADTRAFPQAIHTVKYNLGPITITNVQLIILGIALLLMLTLQFIVQKTKMGKAMRALSVDSDAAQLMGINVNRTISFTFALGSALAGAGGVLIGLYYNSVQPLMGVTPGLKAFVAAVLGGIGIIPGAAIGGFVIGILETLATALGVSDFRDGIVYAILILIFLIRPAGILGKNIKEKV

SEQ ID NO: 10061 - DNA, 588 bp, Streptococcus agalactiae
atgattccagtagttattgaacaaacaagtcgtggtgaacgttcttatgatatttactcacgtcttttaaaagatcgtattattatgttgacaggccaagttgaggataatatggccaatagtatcattgcacagttattgtttctcgatgcacaagataatacaaaggatatttacctttatgtcaatacaccaggtggttcagtatcggctggacttgctattgtggacaccatgaacttcattaaatcggacgtacagacgattgttatggggatggctgcttcgatgggaaccattattgcttcaagtggtgctaaaggaaaacgttttatgttaccgaatgcagaatatatgatccaccaaccaatgggcggaacaggcggaggtacacagcaatctgatatggctatcgctgctgagcatcttttaaaaacgcgtcatactttagaaaaaatcttagctgataattctggtcaatctattgaaaaagtccatgatgatgcagagcgtgatcgttggatgagtgctcaagaaacacttgattatggctttattgatgctattatggaaaataataatttacaa

SEQ ID NO: 10062 - protein, 196 aa, Streptococcus agalactiae
MIPVVIEQTSRGERSYDIYSRLLKDRIIMLTGQVEDNMANSIIAQLLFLDAQDNTKDIYLYVNTPGGSVSAGLAIVDTMNFIKSDVQTIVMGMAASMGTIIASSGAKGKRFMLPNAEYMIHQPMGGTGGGTQQSDMAIAAEHLLKTRHTLEKILADNSGQSIEKVHDDAERDRWMSAQETLDYGFIDAIMENNNLQ

SEQ ID NO: 10063 - DNA, 516 bp, Streptococcus agalactiae
atgttaatgggctatgaagtgtctcgtgatttgcctttagaagatgttgaaatccaaacaccagtagcgacaactgtacaaaaacaattagctgggaaaaagttagcaattgttccaattttacgtgcaggtattggtatggttgatggtttcttaagccttgtgccagctgctaaagttggtcatatcggtatgtatcgtgatgaagagactttccaaccagtcgaatatttagttaagttacctgaagatattgatcaacgtcagatttttgtagttgatccaatgcttgctacaggtgggtctgctattttagcagtagattctctaaaaaaacgtggcgcagctagtatcaaattcgtttgtttagtagcagctccagaaggagtggcagcacttcaagaagcacatccagatgtagatatttataccgctgctttggatgaaaaactcaacgaacatggctacattgttcctggactcggagatgctggggatcgcttatttggtacaaaa

SEQ ID NO: 10064 - protein, 172 aa, Streptococcus agalactiae
MLMGYEVSRDLPLEDVEIQTPVATTVQKQLAGKKLAIVPILRAGIGMVDGFLSLVPAAKVGHIGMYRDEETFQPVEYLVKLPEDIDQRQIFVVDPMLATGGSAILAVDSLKKRGAASIKFVCLVAAPEGVAALQEAHPDVDIYTAALDEKLNEHGYIVPGLGDAGDRLFGTK

SEQ ID NO: 10065 - DNA, 1425 bp, Streptococcus agalactiae
atgattcgtttccttctctcaaaacttttgctaattgaagctgctcttctagcgattcctctaactgttggacttatttaccgtgaaccgcaaagtgtcatgatgagtatagtcattaccatgattattttaatcatccttggattactgggttctctctttaaacctaaaaattatcatatctacactaaagaaggcatgttaattgttgcactctgctggatactttggtccttctttggcgcccttccatttgttatttcagggcaaatccctaatattatcgatgctttctttgaagtatcttctggttttacgacaacaggagcaactattcttgatgacgtcagtgtcttatcacccgcgctcttattttggcgtagctttacccatcttatcggtggaatgggggttttagtatttgcccttgccatcatggaaaattctaaaaatagccatttagaggttatgagagctgaagttcctggacctgtatttggtaaagttgtctcgaaacttaaaaaaactgcacaaattttgtatttgttatatcttcttatgtttgcagtatttgcagtaatattatattttgcaggtatgcctttctttgatagtattatcatagcgatgggaactgcaggtacaggtggttttgcagtttacaatgatagcattgctcattataatagtcctctgataactaacttagtttctattggtatgcttatcttcggggttaactttaatctttactatcttcttttactccgaaaaattaaagcattctttggtgatgaggaactaaaaacctatctccgcatcgtggcaatagcaactttcatgattgctctaaacgtcatcggtatgtatgataattttcgacaaggcctcgaacatattttctttgaagtatcagctattattacgacaactggttttggcgtgactgatatcactcgttggcctttgttttcacaggttattttgctattcttgatgtttatcggtggttctgctggctctacagctgggggctttaaagtcatgcgtagcttaatcctagcaaagattgcacgtaaccaagtattgtctacactctatcctaatagagtcatgtcactacacattaataaaagcgttctagataaaaatacacaacatggtgttttaaaatatctaactatctatttagctatcttcatggcactcgttcttgttttaacgcttgatactaatgattttttggttgttatcagtgctgcagcctcatgttttaacaacataggcccactcttaggtagcaatgaaactttctcattctttagtccattctcaaaactccttctttcatttgctatgatagcaggacgtttagaaatataccctgttttattgatgtttattcctaaaacatggtcaaaacta

SEQ ID NO: 10066 - protein, 475 aa, Streptococcus agalactiae
MIRFLLSKLLLIEAALLAIPLTVGLIYREPQSVMMSIVITMIILIILGLLGSLFKPKNYHIYTKEGMLIVALCWILWSFFGALPFVISGQIPNIIDAFFEVSSGFTTTGATILDDVSVLSPALLFWRSFTHLIGGMGVLVFALAIMENSKNSHLEVMRAEVPGPVFGKVVSKLKKTAQILYLLYLLMFAVFAVILYFAGMPFFDSIIIAMGTAGTGGFAVYNDSIAHYNSPLITNLVSIGMLIFGVNFNLYYLLLLRKIKAFFGDEELKTYLRIVAIATFMIALNVIGMYDNFRQGLEHIFFEVSAIITTTGFGVTDITRWPLFSQVILLFLMFIGGSAGSTAGGFKVMRSLILAKIARNQVLSTLYPNRVMSLHINKSVLDKNTQHGVLKYLTIYLAIFMALVLVLTLDTNDFLVVISAAASCFNNIGPLLGSNETFSFFSPFSKLLLSFAMIAGRLEIYPVLLMFIPKTWSKL

SEQ ID NO: 10067 - DNA, 792 bp, Streptococcus agalactiae
atggatagtaggcctattggctttctagattctggtgtaggtggtttaacggttgttaaggaaatgttccgtcaacttccagaagaggaagtaatcttcattggagatcaggctagagctccgtatggtcctagacctgctcaacagattagagagtttacctggcagatggttaacttcttattgactaaaaatgttaagatgattgttatagcttgtaatacagcaactgcagttgcctggcaagaaattaaagaaaaactagacatccctgttttaggcgttattttaccaggagctagcgcagctatcaaatcaactaatttagggaaagttggtattataggtactcccatgactgttaaatcagatgcttatcgtcaaaaaattcaagctttgtctccaaatactgctgtggtatcccttgcttgtccgaaatttgttccaattgtggaatcaaatcagatgtcttctagtttagccaaaaaggtggtttatgaaacgttgtccccattagttggtaaattagatactttaattttaggttgcacgcattatcccctattacgtcccatcattcaaaatgttatgggggctgaggttaaattaattgatagtggcgcagaaaccgttcgtgatatttctgttttattgaactattttgagataaaccataattggcaaaataaacacggtggtcatcacttttacacaaccgccagcccaaaaggttttaaagaaattgcagaacaatggcttagtcaagaaataaatgtggagcgtatcgtatta

SEQ ID NO: 10068 - protein, 264 aa, Streptococcus agalactiae
MDSRPIGFLDSGVGGLTVVKEMFRQLPEEEVIFIGDQARAPYGPRPAQQIREFTWQMVNFLLTKNVKMIVIACNTATAVAWQEIKEKLDIPVLGVILPGASAAIKSTNLGKVGIIGTPMTVKSDAYRQKIQALSPNTAVVSLACPKFVPIVESNQMSSSLAKKVVYETLSPLVGKLDTLILGCTHYPLLRPIIQNVMGAEVKLIDSGAETVRDISVLLNYFEINHNWQNKHGGHHFYTTASPKGFKEIAEQWLSQEINVERIVL

SEQ ID NO: 10069 - DNA, 564 bp, Streptococcus agalactiae
atgtttccacaaaatatgattgccatcatgcaaaaaatgccagggttgtattttggagcaatcatcttagaattggttttagtctttgttgctagtggagcggcgcgtcgaaacacaccagctgcattaccattatttttgatttattcagctttgaatgggtttactttaagtttcattatcgcaaggtacacgcaaactacagttcttcaagcttttataacatctgcggctgttttctttgcaatggctttgattggagctaagactaaaaaagatttatcaggtatgcgtaaagcgttaatggctgctttaattgggattttaattgcaagtcttgttaatttatttatcggtagtgggggtatgagttatatcattagtatcgtatgtgtcatcatcttttctggattgattgcttacgataaccaaatgattaaatatgtctacaatagccaaggcggccaagtcgcagatggttgggcagtttcgatggcactaagcctttatcttgattttattaatctattcttaaatattcttcgtctttttgcacgaaatgat

SEQ ID NO: 10070 - protein, 188 aa, Streptococcus agalactiae
MFPQNMIAIMQKMPGLYFGAIILELVLVFVASGAARRNTPAALPLFLIYSALNGFTLSFIIARYTQTTVLQAFITSAAVFFAMALIGAKTKKDLSGMRKALMAALIGILIASLVNLFIGSGGMSYIISIVCVIIFSGLIAYDNQMIKYVYNSQGGQVADGWAVSMALSLYLDFINLFLNILRLFARND

SEQ ID NO: 10071 - DNA, 501 bp, Streptococcus agalactiae
atgaaaaagtatcaagacgataaggacttcatggatttggtcggtcaccttattgaccatccacgtttccaaaaactcgaagctattgtccaacatcatcactcaactcgcttagagcattctataaatgttagttatacaagttataaaattgctaagaagtttggttgggatgcgagtagtactgctcgaggtggtttactacatgatttcttttattatgattggcgtgtaacgaaatttaacaagagccatgcctgggttcatccaaggatagcggttcgtaatgcgcgaaaattaactgatttaaacgctagagaagaagatattattttgaagcacatgtggggagcgactattgcaccgccacgttataaagaaagttatattgtgactatggttgataagtattgggcagtacgagaggcttctcgtccactcaaacgtatttttaagaaacctatccgttttagtcgcaaattcttaggtagtcataatcat

SEQ ID NO: 10072 - protein, 167 aa, Streptococcus agalactiae
MKKYQDDKDFMDLVGHLIDHPRFQKLEAIVQHHHSTRLEHSINVSYTSYKIAKKFGWDASSTARGGLLHDFFYYDWRVTKFNKSHAWVHPRIAVRNARKLTDLNAREEDIILKHMWGATIAPPRYKESYIVTMVDKYWAVREASRPLKRIFKKPIRFSRKFLGSHNH

SEQ ID NO: 10073 - DNA, 276 bp, Streptococcus agalactiae
atgaaaaaagttcatttaattgtctcagggcgcgttcaaggagtcggatttcgctatgcaacttattccttagctttagaaataggtgatatttacggtcgcgtttggaataacgatgatggaactgttgaaattttagcacaatctacagattcaaataaaatgacacaatttattcagaaaattcgaaaaggaccttcaaaatggtctaaagtaacttatgttgatattaaactagataacttcgatgattttaatgactttaaaatgagtaat

SEQ ID NO: 10074 - protein, 92 aa, Streptococcus agalactiae
MKKVHLIVSGRVQGVGFRYATYSLALEIGDIYGRVWNNDDGTVEILAQSTDSNKMTQFIQKIRKGPSKWSKVTYVDIKLDNFDDFNDFKMSN

SEQ ID NO: 10075 - DNA, 798 bp, Streptococcus agalactiae
atggccaacctcattacttatttcgctcaacaccaagggcttggttttggtgtcgctatcattattgtaaccgtcatcgtacgtgtcgttatcttaccacttggactttatcagtcttggaaagctagctatcaagctgaaaaaatggcatactttaagcctttatttgaacctattaatgaacgactacgcaatgctaaaacacaagaagaaaaattagcagctcagacagaattaatgacagctcaacgtgagaatggccttagcatgtttggcggtattggctgcttgccattactcattcagatgccatttttctcagctattttctttgctgcacgctatactcctggagtctctagtgcaaccttcttgggacttaacttaggtcaaaagagtctgacacttactgtcattatcgccattctttattttgtacaatcttggttgtcaatgcaaggtgttccagatgaacaacgtcagcaaatgaaaacaatgatgtatctgatgccaataatgatggtattcatgtctattagtttacctgctagtgttgcgctttattggtttattggtggtattttcagtattatccagcagctagttacgacttatgtacttaagcctaaactacgccgaaaagtagaagaagaatatactaaaaatcctcctaaagcctacaaagctaataacgcacgaaaagatgttacaaattcaactaaagccactgaatctaatcaagcaattattacatctaaaaaaacaaatcgtaacgccggaaaacaaaaaagacgggga

SEQ ID NO: 10076 - protein, 266 aa, Streptococcus agalactiae
MANLITYFAQHQGLGFGVAIIIVTVIVRVVILPLGLYQSWKASYQAEKMAYFKPLFEPINERLRNAKTQEEKLAAQTELMTAQRENGLSMFGGIGCLPLLIQMPFFSAIFFAARYTPGVSSATFLGLNLGQKSLTLTVIIAILYFVQSWLSMQGVPDEQRQQMKTMMYLMPIMMVFMSISLPASVALYWFIGGIFSIIQQLVTTYVLKPKLRRKVEEEYTKNPPKAYKANNARKDVTNSTKATESNQAIITSKKTNRNAGKQKRRG

SEQ ID NO: 10077 - DNA, 501 bp, Streptococcus agalactiae
atgattattagaaatggttgcctagaggatttacagcaagtcattagtattgaacaaataaatttttcagaagcagaggctgcgagtaaaaaagcaatgcaagaacgtttaacgataatgactgatacttttttagttgcagagattaatggtcgtttagcaggttacattgaaggaccggttattaaaggtcggtacttaacggacgatttattccataaagtttctgaattccctgtaagggtaggtggtttcataggaattactagtctatcaatacatcctgattttaaaggtcaggggattggtacagcattattagcagcgatgaaagacctggttgtttctcaagaacgagatggtataagtttaacttgccatgatgatttaatttccttctatgaaatgaatggatttaaagatgagggagaatctgactccaaacatggtggttcgctttggtataatatgatttggaataatccaacacgatcaatttgt

SEQ ID NO: 10078 - protein, 167 aa, Streptococcus agalactiae
MIIRNGCLEDLQQVISIEQINFSEAEAASKKAMQERLTIMTDTFLVAEINGRLAGYIEGPVIKGRYLTDDLFHKVSEFPVRVGGFIGITSLSIHPDFKGQGIGTALLAAMKDLVVSQERDGISLTCHDDLISFYEMNGFKDEGESDSKHGGSLWYNMIWNNPTRSIC

SEQ ID NO: 10079 - DNA, 711 bp, Streptococcus agalactiae
atgacaccccaagcattttatcaagttctgatagagcatggtattacacttactgacaaacagaaaaaacaatttgaaacttattttagacttcttgttgaatggaatgagaaaattaacctaacagctattacagataaggaagaggtttacttaaagcacttctatgattctattgcgccgattttacaaggttatattgacaatagtcctcttagcattttagatattggtgctggtgcaggttttcctagtattcctatgaaaatcctttatcctgaaattgatattactattattgattcactgaataaacgcattaattttctaaacatattagctaatgaacttgaactttcaggagttcacttcttccatgggcgcgctgaggactttggtcaagatagagtatttcgagctaaatttgatatcgtaacagctcgtgcagtagctaaaatgcaggttctagcagaattgacaataccttttcttaaagttaatggtcgcttgattgcactgaaagctgcagctgctgaagaggaattaatttctgcagaaaaagctttgaaaacactattttcacaagtaactgtaaataaaaattataagttacctaatggtgatgaccgaaatatcacaatcgttagcaagaaaaaagaaacgcctaataaataccctcgtaaagctggtactccaaacaagaagcctttg

SEQ ID NO: 10080 - protein, 237 aa, Streptococcus agalactiae
MTPQAFYQVLIEHGITLTDKQKKQFETYFRLLVEWNEKINLTAITDKEEVYLKHFYDSIAPILQGYIDNSPLSILDIGAGAGFPSIPMKILYPEIDITIIDSLNKRINFLNILANELELSGVHFFHGRAEDFGQDRVFRAKFDIVTARAVAKMQVLAELTIPFLKVNGRLIALKAAAAEEELISAEKALKTLFSQVTVNKNYKLPNGDDRNITIVSKKKETPNKYPRKAGTPNKKPL

SEQ ID NO: 10081 - DNA, 1377 bp, Streptococcus agalactiae
atgaaacatttctttgattacaagacaatgtctgtcgcacgtaaactcagcattagttttatcgctgttatcctattgggaagtattttactttcacttccaatttttcaatatgctaacgcccctaaaacacattacattgatcaccttttcacgactgtttcaatggtatgtgtaactggtttatctgtttttcctatcagtaaggtttataacggttgggggcagattgtagctattttactcatgcaaacagggggacttggtttagtaacactaatgtcgttgtcttactataccctaagacgtaaaatgtcgttaaatgatcagacccttttgcagtcagcgataacttataacagttcgacagatttaaaaaaatatctctatatgatttttaaagtaactttaactttagaagttttagcagccagcattttagccatagattttattcctcgatttggtttgggtcatggtatctttaatagtatattcttagctgtctcagccttttgtaatgccggttttgataatctagaggcaacgagcttagctcaatttaaactaaatcctttggttaacattatcgtttgtttcttgattatttcaggaggacttggatttgccgtatggaaagatttaattgaagctactatacaaacatctcacaagggaccaaaattaatcaagacatttccaaaacgcctcagcaaccattctaaactggttttaaaaacaacaaccattattttactaacaggaactttgctttcttggttgttagagtttggaaattttagaacaattgctaatttatctctacctaaacaactaatggtcagctttttccaaacagttacgatgcgtaccgctggattttcaactattgattatacccaaactgatttcgcaaccaaccttgtttatattatccaaatgttaattggaggagctcctggtggaacggcaggaggatttaaagtcactgttatcgccattttactcttactatttaaagccgaactgagtggccaaagccaagtgacttttcattatcgaacaattccttccagtattattaaacaaacactatcgattttaactttcttttttatcatacttattagcggctatctccttcttctggaactcaatccccatatagatcctttttctcttttctttgaggcatctagtgccttagcaaccgtgggtgtaacaatgaacactaccaatcaattaactctgggcggtcgaattgtaattatgttcctcatgtttattggtcgagtcggtccaattaccgtactgctatcaattcttcagaaaaaagagaaggaaattcactatgctgaaacagaaattattctaggt

SEQ ID NO: 10082 - protein, 459 aa, Streptococcus agalactiae
MKHFFDYKTMSVARKLSISFIAVILLGSILLSLPIFQYANAPKTHYIDHLFTTVSMVCVTGLSVFPISKVYNGWGQIVAILLMQTGGLGLVTLMSLSYYTLRRKMSLNDQTLLQSAITYNSSTDLKKYLYMIFKVTLTLEVLAASILAIDFIPRFGLGHGIFNSIFLAVSAFCNAGFDNLEATSLAQFKLNPLVNIIVCFLIISGGLGFAVWKDLIEATIQTSHKGPKLIKTFPKRLSNHSKLVLKTTTIILLTGTLLSWLLEFGNFRTIANLSLPKQLMVSFFQTVTMRTAGFSTIDYTQTDFATNLVYIIQMLIGGAPGGTAGGFKVTVIAILLLLFKAELSGQSQVTFHYRTIPSSIIKQTLSILTFFFIILISGYLLLLELNPHIDPFSLFFEASSALATVGVTMNTTNQLTLGGRIVIMFLMFIGRVGPITVLLSILQKKEKEIHYAETEIILG

SEQ ID NO: 10083 - DNA, 561 bp, Streptococcus agalactiae
atgggattgttaggaggtttattccttgttttaactagtcctagaggagttattgctaataaattagtatttggagttttagataaagttgtttctgtttttagagctctgcccttcattattcttcttgctttgattgcgccagtaactcgcgtaattgtaggaacaacacttggttcaccagcagctttggtacctctttctttggcagttttcccattttttgctcgtcaagttcaagttgttttagctgaacttgatggtggagttattgaggctgcacaagcctcaggtggaacactttgggatattattgtagtttatcttcgtgaaggtctaccagatttaattcgagtatcaacggttactttgatttctttagtaggtgaaacagctatggctggcgctattggtgcaggaggattgggttctgttgctattactaaaggatataactattctcgtgatgatattactttagtagcgactattctgattttattattaattttctttatccaatttttaggtgattttttaacacgtcgcttgagtcataaa

SEQ ID NO: 10084 - protein, 187 aa, Streptococcus agalactiae
MGLLGGLFLVLTSPRGVIANKLVFGVLDKVVSVFRALPFIILLALIAPVTRVIVGTTLGSPAALVPLSLAVFPFFARQVQVVLAELDGGVIEAAQASGGTLWDIIVVYLREGLPDLIRVSTVTLISLVGETAMAGAIGAGGLGSVAITKGYNYSRDDITLVATILILLLIFFIQFLGDFLTRRLSHK

SEQ ID NO: 10085 - DNA, 714 bp, Streptococcus agalactiae
atgggacgtaagtgggccaatattgttgccaaaaagactgctaaagatggtgctaactcaaaagtatacgctaaattcggtgttgaaatatatgttgctgcaaagcaaggtgaaccagaccccgagtcaaactcagctctaaaattcgttttggaccgtgctaagcaagcacaagttccaaagcatgttattgataaagcgattgataaagccaaaggaaacacagatgaaactttcgtagagggacgctatgaaggttttggtccaaatggttcaatgattattgtggatactttgacatcaaatgttaaccgtacggcagcaaatgtacgtactgcttacggtaagaacggtggcaatatgggagcttcaggatcggtatcctacttatttgataaaaaaggtgtcatcgtttttgctggtgatgatgctgacactgtcttcgaacaattacttgaagcggatgtagacgtagatgatgttgaagcagaagagggaacaataacagtttataccgccccaacagatcttcataaaggtatccaagcacttcgcgataatggtgtagaagaattccaagttactgaacttgaaatgattcctcaatcagaagtagtattggaaggtgatgaccttgaaacttttgaaaagcttattgacgcactcgaatcagatgatgatgttcaaaaagtttatcataatgtagcagatttc

SEQ ID NO: 10086 - protein, 238 aa, Streptococcus agalactiae
MGRKWANIVAKKTAKDGANSKVYAKFGVEIYVAAKQGEPDPESNSALKFVLDRAKQAQVPKHVIDKAIDKAKGNTDETFVEGRYEGFGPNGSMIIVDTLTSNVNRTAANVRTAYGKNGGNMGASGSVSYLFDKKGVIVFAGDDADTVFEQLLEADVDVDDVEAEEGTITVYTAPTDLHKGIQALRDNGVEEFQVTELEMIPQSEVVLEGDDLETFEKLIDALESDDDVQKVYHNVADF

SEQ ID NO: 10087 - DNA, 519 bp, Streptococcus agalactiae
atgacttgtgcacttttactaattgatatccaacaaggtattatggataagaaaccaaagcatttaacaaattttgcagtgcttttagatgatttacttttaagtgccaaaggttctaattgtgaagtgatatggataaggcatcatgataaggaattgcctcaaggttctccacagtgggaaatttgggaacagcgacatcttgtgacgcatcacaaaataattgataaaacttacaatagttgttttaaagatactcatttacatgattacttgcaaagtaagcatattagtcaattaatcatgatgggacttcaaacagaatactgttttgatacatcagtaaaagttgcttttgaatatggttatgatatctttattccacaaggtggacacctaacatttgatacaccaactttaagtggggattctattaaaaaacattacgagaatatttggcatcatcgttttgcgacaatggtagcaaaagatagcttattgaaattaataaacgaggaa

SEQ ID NO: 10088 - protein, 173 aa, Streptococcus agalactiae
MTCALLLIDIQQGIMDKKPKHLTNFAVLLDDLLLSAKGSNCEVIWIRHHDKELPQGSPQWEIWEQRHLVTHHKIIDKTYNSCFKDTHLHDYLQSKHISQLIMMGLQTEYCFDTSVKVAFEYGYDIFIPQGGHLTFDTPTLSGDSIKKHYENIWHHRFATMVAKDSLLKLINEE

SEQ ID NO: 10089 - DNA, 630 bp, Streptococcus agalactiae
atggcactcgaattgctaacaccatttacaaaagttgaattagaagagaaaaagcgagatactaaccgaaaacaaattggaattatgggaggaaattttaaccctgttcataacgcccaccttgttgttgcagatcaagtacgtcagcaattgtgtttagaccaagttctgttgatgcctgaatttcagccaccacatattgataaaaaagagacaattgatgaacagcatcgtctcaagatgcttgaattagcaatagaaggcattgatggtttatctattgaaccaattgaaattgaacgtaaaggtatcagctatacatacgatacgatgaagcttctaattgaaaaaaatccagatgttgattattatttcattattggggcagatatggtggaatatctacctaagtggcatcgtattgatgaacttgttaaaatggtgcagtttgttggtgttcaacgtccaaaatataaagctggtacatcatatcccgttatttgggtggatctgccattgatggatatctcatcaagtatgattcgtcaatttattaaaagtaatcgtcagcccaactatttactgcctagagaggtattagattatatcaggaaagaaggtctttacaaa

SEQ ID NO: 10090 - protein, 210 aa, Streptococcus agalactiae
MALELLTPFTKVELEEKKRDTNRKQIGIMGGNFNPVHNAHLVVADQVRQQLCLDQVLLMPEFQPPHIDKKETIDEQHRLKMLELAIEGIDGLSIEPIEIERKGISYTYDTMKLLIEKNPDVDYYFIIGADMVEYLPKWHRIDELVKMVQFVGVQRPKYKAGTSYPVIWVDLPLMDISSSMIRQFIKSNRQPNYLLPREVLDYIRKEGLYK

SEQ ID NO: 10091 - DNA, 531 bp, Streptococcus agalactiae
atgaaattgagtatagatgattataggccgaccttcgtggttgaggcagtttatgatttaagagcagaagatttattacgtcatggcattcgtgcggttttagttgatttagataatacactcattgcttggaataatccagatggtactgctgaggtgcgtgcatggttagatgagatgacaacagcggatatttcagttgtagtagtgtctaataacaatcatgctcgcgtagaacgtgcagtatcacgttttggtgtggattttgtaagtcgtgcgatgaaaccatttactcgtggtataaacatggcaattgagcgttatggctttgatcgtgacgaggtgattatggttggagatcaattgatgacagatattcgtgctagtcatcgcgcaggaataaagtccgtattggtaaaaccaattgttaaatctgatgcttggaataccaagttcaatcgcttacgtgaacgtcgcgtttggaaaaaaatagaagagaattacggtaaaatcgtatatcaaaaaggaatt

SEQ ID NO: 10092 - protein, 177 aa, Streptococcus agalactiae
MKLSIDDYRPTFVVEAVYDLRAEDLLRHGIRAVLVDLDNTLIAWNNPDGTAEVRAWLDEMTTADISVVVVSNNNHARVERAVSRFGVDFVSRAMKPFTRGINMAIERYGFDRDEVIMVGDQLMTDIRASHRAGIKSVLVKPIVKSDAWNTKFNRLRERRVWKKIEENYGKIVYQKGI

SEQ ID NO: 10093 - DNA, 885 bp, Streptococcus agalactiae
atgaccttagctgccggactagcatggggcatttctggaattagtggtcaatacttgatgtcgcacggagtacacgttaaccttttgacttctttacgattgttgataacaggtatctttctcttgtctttagctagatcaaaacaaaaggagcatttagtagcagcgtggaaacagccaaaatttttaaagcaggttttacttttttctatatttggtttagttttaaatcaatatgcttttctcagagcgattcatttaacaaatgctggaactgcaacggttttgcaatatatggcaccaatacttattttgagtattgtttgtatcctaaacagacaaagaccaacatcttttgaaataatagcaattgctatggcaattttaggaacctatatgattgcaacgcatgggaagttaggaagtttagctatcacaccgaaaggattaatgtgggggcttggttccgccattacttattctatttatattttattacctgtgaaacttattcatgaatggggaagtacgattgttattggttcaggaatgtttataggtgggattttatttagtttggtgacaaaagcgtggcaataccccttacaaattaatgtgatgagtatacttgcttatattggcattattggtattgggactatttttgcttacacttttttccttaaaggggttagtattgtaggtgctgtcaagggtagcttattagcatcggtagagccagtttcttcggtatttttgacagtacttgttttaggagaaattttttatccaatagatttacttgggatgctgtttatttttcttgctgtaactctaatctcttacaaagatttaattgcattgaagaaaatgaaacgagtaaga

SEQ ID NO: 10094 - protein, 295 aa, Streptococcus agalactiae
MTLAAGLAWGISGISGQYLMSHGVHVNLLTSLRLLITGIFLLSLARSKQKEHLVAAWKQPKFLKQVLLFSIFGLVLNQYAFLRAIHLTNAGTATVLQYMAPILILSIVCILNRQRPTSFEIIAIAMAILGTYMIATHGKLGSLAITPKGLMWGLGSAITYSIYILLPVKLIHEWGSTIVIGSGMFIGGILFSLVTKAWQYPLQINVMSILAYIGIIGIGTIFAYTFFLKGVSIVGAVKGSLLASVEPVSSVFLTVLVLGEIFYPIDLLGMLFIFLAVTLISYKDLIALKKMKRVR

SEQ ID NO: 10095 - DNA, 1239 bp, Streptococcus agalactiae
atggatatccatcaaaacatgcattttgatcgtaaaaattatttctatccagataatcctaaagcttatcaaatttcacagtttgatgagcctattggttacaatggttggattgaaatcgaattagaagatggtacacgaaaaaaaattcgtattgagcgtgcccacctcgaagaagatgcaggaaaaaatacacatgggacagatggttattcctatgttgaccttaatagacaaggtgttccactgattgaaattgtatcagaagctgatatgcgttctcctgaggaagcttatgcttatttgacagctctcaaagagattatccaatatactggaatttctgacgttaaaatggaagaaggttctatgcgtgtagatgccaatatttcacttcgtccttatggtcaagaagagtttggtactaaagcagaacttaagaaccttaactcattcaataatgtacgtaaaggtttgatacatgaagaaaaacgtcaagcacaagttttacgatctggtggtcaaattcagcaagagactcgtcgttttgatgaaacaacaggtgagactattttgatgcgtgtcaaggaaggctcatcagattatcgctatttccctgaaccagatttaccactatttgatatctcggatgaatggattgatcaagttcgtttagaattaccagaatttccacaggaacgtcgtgcgaaatatgtatcgtcttttggtctatcatcttatgatgctagccaattaacagctacaaaagcaacttctgatttctttgaaaaagctgttgctattgggggtgatgcaaaacaagtttccaattggttacaaggagaagtggcgcaatttcttaacagtgaatcaaaatcaatcgaagaaattggtctgactcctgagaatttggttgagatgattggcttgattgctgacggtacaatttcatccaaaattgctaaaaaagtttttgtgcatttagctaaaaatggtggttcagctgaagaattcgttaaaaaggctggtttagttcaaatttcagatcctgaagtattaatcccaattattcatcaagtctttgcagataatgaagctgctgtgattgactttaagtcaggaaaacgcaatgctgataaggccttcacaggttatctaatgaaagcaacaaaaggacaagctaatccacaagttgctctgaagctgttagcgcaagaattagcaaaattaaaagaagaa

SEQ ID NO: 10096 - protein, 413 aa, Streptococcus agalactiae
MDIHQNMHFDRKNYFYPDNPKAYQISQFDEPIGYNGWIEIELEDGTRKKIRIERAHLEEDAGKNTHGTDGYSYVDLNRQGVPLIEIVSEADMRSPEEAYAYLTALKEIIQYTGISDVKMEEGSMRVDANISLRPYGQEEFGTKAELKNLNSFNNVRKGLIHEEKRQAQVLRSGGQIQQETRRFDETTGETILMRVKEGSSDYRYFPEPDLPLFDISDEWIDQVRLELPEFPQERRAKYVSSFGLSSYDASQLTATKATSDFFEKAVAIGGDAKQVSNWLQGEVAQFLNSESKSIEEIGLTPENLVEMIGLIADGTISSKIAKKVFVHLAKNGGSAEEFVKKAGLVQISDPEVLIPIIHQVFADNEAAVIDFKSGKRNADKAFTGYLMKATKGQANPQVALKLLAQELAKLKEE

SEQ ID NO: 10097 - DNA, 495 bp, Streptococcus agalactiae
atgctaggtatcatagatgcaaaacctaaggttggttatttttatttaggacagtatcatgcttcaatagggacaagtcattttgaaaagatgacagtttcagaaattatggggatccctctgacagttcatcaaaaagattcagtttatgatgttattgtacatatttttatggaagatgctggttgtgcttttatcttggatgatgatgattttctctgtggagtcgtgtcacgtaaagatttactaaaaatcagtattggcggaggagatctttctaaaatgccaataggaatggtgatgacacgtatgccacacgtgacaactgttttagaaaatgaaagtctttttgcggcagctgataaattagtgagcagaaaagtggatagtctccctgtcgttcgtcatgataagcaatatcccgaaaaatttaaagtgatcgggaaattatctaaaacaatcctcgctagtttgtttttagaaataagagattat

SEQ ID NO: 10098 - protein, 165 aa, Streptococcus agalactiae
MLGIIDAKPKVGYFYLGQYHASIGTSHFEKMTVSEIMGIPLTVHQKDSVYDVIVHIFMEDAGCAFILDDDDFLCGVVSRKDLLKISIGGGDLSKMPIGMVMTRMPHVTTVLENESLFAAADKLVSRKVDSLPVVRHDKQYPEKFKVIGKLSKTILASLFLEIRDY

SEQ ID NO: 10099 - DNA, 783 bp, Streptococcus agalactiae
atgccgaatttattagaaaaaactagaaaaattacatccatcttacagcgttccgtagatagcttagatgccgaactaccatataatacaatggcggctcaattagctgatattattgactgtaacgcatgtattattaatggtggtggtaacttacttggctatgccatgaaatataaaacaaacactgaccgtgtggaagaattttttgaaacaaaacaattcccagattactatgttaaatctgctagtcgtgtttatgatacagaagctaacttatcagtagataatgatttgtcaattttcccagttgagacaaaggaaaacttccaagatggtattacaacaatcgctccaatttatggtggtggaatgcgcttgggaacatttattatctggcgtaatgataaagaatttagcgacgatgatttgattttagttgaaattgcaagcaccgttgttggtattcaattacttaaccttcaaacagaaaatctagaagaaaatattcgtaaacaaacagcggtgacaatggctatcaacactctatcttattcagaaatgaaagctgtagctgctatcttaggagaattagatggacttgaaggacgcctaacggcatctgttattgcagaccgtattggaattacacgttccgttattgtaaatgctcttcgtaaattggagtctgcgggaatcattgagagccgctcactcggtatgaagggaacatacctcaaagttattaacgaaggtatttttgacaaattaaaagaatataat

SEQ ID NO: 10100 - protein, 261 aa, Streptococcus agalactiae
MPNLLEKTRKITSILQRSVDSLDAELPYNTMAAQLADIIDCNACIINGGGNLLGYAMKYKTNTDRVEEFFETKQFPDYYVKSASRVYDTEANLSVDNDLSIFPVETKENFQDGITTIAPIYGGGMRLGTFIIWRNDKEFSDDDLILVEIASTVVGIQLLNLQTENLEENIRKQTAVTMAINTLSYSEMKAVAAILGELDGLEGRLTASVIADRIGITRSVIVNALRKLESAGIIESRSLGMKGTYLKVINEGIFDKLKEYN

SEQ ID NO: 10101 - DNA, 411 bp, Streptococcus agalactiae
atgtcacaaaaatatgaacgcatccttgtcgctattgatggatcaacagaatctgaacttgcttttgaaaaggcagttaacgttgctcttcgcaatgattctgaattaatcttgacacatgttatagatacacgtgctttacaaagctttgcgacatttgatacttatatctatgaaaaattagaaaaagaagcaaaagatgtccttgaggaatatgaaaaacaagctcgtgaaaaaggagcagataaagttagacaagtcattgaatttggtaatcccaaaacattacttgcacatgatattccagaaaaagaaaaagtagacttgattatggttggtgcaacaggtcttaatacctttgaacgtttcctatcggatcttcctcagaatacatccttcgtcacgctaaag

SEQ ID NO: 10102 - protein, 137 aa, Streptococcus agalactiae
MSQKYERILVAIDGSTESELAFEKAVNVALRNDSELILTHVIDTRALQSFATFDTYIYEKLEKEAKDVLEEYEKQAREKGADKVRQVIEFGNPKTLLAHDIPEKEKVDLIMVGATGLNTFERFLSDLPQNTSFVTLK

SEQ ID NO: 10103 - DNA, 891 bp, Streptococcus agalactiae
atgtccagcgccgataacccaatgaaatacgttgatttatcattagatgaccttgatttgactgttgtagattttctaaatcttcccagtcctcaaatcacccctcatcatatgcttgatatctatcactatctgaagcaacatgccagtaattttgatggtgttgtcattacgcatgggactgacactttagaagaaacagcatattttttagacacaatgatactccctaaaatcccaatcatcattaccggtgctatgagaagcacaaatgaacttggtagcgatggcgtttataattacctatcagccctccgtgtcgctaatagtactaaagctgccgacaagggggtgctagttgtcatgaatgatgagatacatgctgctaaatatgtcacaaaaacacatacaacaaacgtttcgacattccaaacccctacacatggcccccttgggattattatgaaacaagacctgcttttctttaaagcaactgaagagagagttcgttttgatttagataaaattacaggaactgttcctatcgtgaaagcatatgctggcatgggtgatagtggtatcattagctttttaaattctcaaaatattagcggattagttattgaagcactcggtgcagggaatatgcccccaaaagctgcacaagaaatcgaagaattaattgagcaaggtgtccctgttgttctagtgtctcgctgttttaatggtattgctgagccagtttacggatatgaaggtggcggagcaaaattacaagaatctggtgtcatgtttgttaaagaactaaacgctcccaaagccagactcaaattactcattgcactcaatgcaggtctcacagggcaaaatctaaaagactatattgaaggt

SEQ ID NO: 10104 - protein, 297 aa, Streptococcus agalactiae
MSSADNPMKYVDLSLDDLDLTVVDFLNLPSPQITPHHMLDIYHYLKQHASNFDGVVITHGTDTLEETAYFLDTMILPKIPIIITGAMRSTNELGSDGVYNYLSALRVANSTKAADKGVLVVMNDEIHAAKYVTKTHTTNVSTFQTPTHGPLGIIMKQDLLFFKATEERVRFDLDKITGTVPIVKAYAGMGDSGIISFLNSQNISGLVIEALGAGNMPPKAAQEIEELIEQGVPVVLVSRCFNGIAEPVYGYEGGGAKLQESGVMFVKELNAPKARLKLLIALNAGLTGQNLKDYIEG

SEQ ID NO: 10105 - DNA, 912 bp, Streptococcus agalactiae
atgttacaaaacattggacaaacaggcattcaagcaactcgaattgctttaggttgtatgagaatgagtgacttgaaaggaaaacaagctgaagaagtagttggaacagcattagatttgggtattaatttttttgatcatgctgatatttatgggggagggctatctgaattacgctttcgagatgcaatcaaacatttaaatgtcaatcgtgacaaaatgattattcaatctaaatgtgggatacgagaaggttactttgatttttctaaagagtatattttatcatcagtagatggtattttagaaagattagggacagaatatttagattttctcattcttcatcgtccagatgtattagttgagcctgaagaagtagcagaagcatttaccaaactgagggcagaaggtaaagtaaaacactttggtgttagcaatcaaaaccggtttcaaatggagttgttacaatcctaccttgacgagcccttagcagtgaatcaacttcagttatcgccagcacatacaccaatgtttgatgcagggttaaatgttaacatgttaaataaagcttcaattgaacatgatgatggcattgttgattattgtcgtcttaaaagagttaccattcaagcttggtctccatttcaaattgatttatctcgtggtttatttgttaatcatccggattataaggaattaaatgaaaccatagctaaactggcaaaaaactacaatgttagcagcgaagctattgtgattgcatggattttacgtcatcctgccaaaatgcaggcgattgttggttcaatgaatccatctcgtttaaaggcgattgataaggctaatgatatcgctttaacccgtaaagaatggtatgatatttaccgtagtgcaggtaatatattgcct

SEQ ID NO: 10106 - protein, 304 aa, Streptococcus agalactiae
MLQNIGQTGIQATRIALGCMRMSDLKGKQAEEVVGTALDLGINFFDHADIYGGGLSELRFRDAIKHLNVNRDKMIIQSKCGIREGYFDFSKEYILSSVDGILERLGTEYLDFLILHRPDVLVEPEEVAEAFTKLRAEGKVKHFGVSNQNRFQMELLQSYLDEPLAVNQLQLSPAHTPMFDAGLNVNMLNKASIEHDDGIVDYCRLKRVTIQAWSPFQIDLSRGLFVNHPDYKELNETIAKLAKNYNVSSEAIVIAWILRHPAKMQAIVGSMNPSRLKAIDKANDIALTRKEWYDIYRSAGNILP

SEQ ID NO: 10107 - DNA, 2526 bp, Streptococcus agalactiae
atggcaaatattctacgcactgttattgaaaatgacaagggtgaattaaaaaaattagataaaatagctaagaaagttgactcttacgcagatcatatggctgcgttatcagatgaagctttacaagcaaaaactccagaatttaaagaacgttatcaaaatggtgaaactttagatcaattgttaccggaagcgtttgcggtagttcgtgaagcttctaaacgtgtattaggtttatacccataccacgtccaaattatgggtggtatcgttcttcaccatggtgatattccagaaatgcgtactggtgagggaaaaactttaacagcgacaatgcctgtttatctaaatgctatctcaggattaggtgttcatgttattactgttaatgagtatttatcaacacgtgatgcgaccgaaatgggtgaggtttatagttggcttggattatctgtagggattaacttagcagctaagtcaccatttgaaaaacgcgaagcttacaattgtgatatcacatactcaactaacgcagaagtcggatttgactaccttcgagacaatatggttgttcgccaagaagatatggtgcaacgcccactcaactatgctttggttgatgaggttgactctgtattaatcgatgaagctaggacgccattgattgtttcaggtcctgtaagctctgagatgaaccaactgtatacacgtgcggacatgtttgtaaaaacgcttaatagcgatgattatatcattgatgttccaacaaaaacaattggtttatcagatacaggtattgacaaggctgaaaactatttccatctaaataacttgtatgatctcgaaaatgttgccttaactcactacattgataacgctcttcgagctaactatattatgttgttaaatattgattatgtggttagtgaagaacaagagattttaattgtggaccaatttaccggtcgtacgatggaaggacgtcgtttctcagatggcttacaccaagctattgaagcaaaagagtcagtgccaatccaagaagaatcaaaaacgagcgcttcaattacttaccaaaatatgttccgtatgtaccataaattagcaggaatgactggtactggtaagactgaggaagaagagtttcgtgaaatttataatatgcgcgttattcctatcccaacaaatcgtcctgttcaacgtatagatcattcagatctactttatccaactcttgactctaaatttagagcggtggtagcagatgtcaaagaacgttatgaacaaggacaacctgtactggttggtacagtagctgttgaaacgtcagacttaatttctagaaaattagttgctgctggagtaccacatgaagttttgaatgctaaaaatcactttaaagaagctcaaatcattatgaatgctgggcaacgtggtgctgttacaatcgcaaccaacatggctggtcgtggtactgatatcaagcttggtgaaggggttcgtgaacttggtggtttatgtgttattggtacagagcgtcatgaaagccgtcgtattgataaccagcttcgtggtcgttcgggtcgtcaaggagatccaggtgaatcacaattctatctttcgttagaagatgatttgatgcgtcgctttggtacagatcgtattaaagtggttcttgagcgaatgaatttagctgaagatgatacagttattaaatcaaaaatgttgacacgacaagttgaatcagctcaacgccgcgttgaaggtaataactatgacacacgtaaacaagtcttgcaatacgatgatgttatgcgtgaacaacgtgagattatttatgctaaccgtagagaagtgattactgctgagcgtgatttaggaccagagctcaaagggatgattaaacgtacgattaaaagagcagttgatgcacatagcagaagcgataaaaatactgcagcagaagctattgttaattttgcaagatcggcgttattagatgaagaagctatcacagtttcagaacttcgtggtctaaaagaggctgaaattaaagaacttctttatgaacgtgccttagctgtttatgagcaacaaattgctaaattaaaagatccagaagctattatcgaattccaaaaagtcttaatcttgatggtagtggataatcaatggacagagcatattgatgccttagatcaattacgtaactccgttggacttcgtggttatgctcaaaataacccaatcgttgagtatcaatcagaaggtttccgtatgttccaagatatgattggttcgattgagtttgatgtgacacgtacattgatgaaagctcaaattcatgaacaagagcgtgaacgtgcttctcaacatgctacgacaacagcagagcaaaatatctcggcacaacatgtacctatgaataatgaatcaccagaataccaagggattaaacgtaatgataaatgtccttgtggctctggcatgaagtttaaaaattgtcatggtctgagatgtttacaa

SEQ ID NO: 10108 - protein, 842 aa, Streptococcus agalactiae
MANILRTVIENDKGELKKLDKIAKKVDSYADHMAALSDEALQAKTPEFKERYQNGETLDQLLPEAFAVVREASKRVLGLYPYHVQIMGGIVLHHGDIPEMRTGEGKTLTATMPVYLNAISGLGVHVITVNEYLSTRDATEMGEVYSWLGLSVGINLAAKSPFEKREAYNCDITYSTNAEVGFDYLRDNMVVRQEDMVQRPLNYALVDEVDSVLIDEARTPLIVSGPVSSEMNQLYTRADMFVKTLNSDDYIIDVPTKTIGLSDTGIDKAENYFHLNNLYDLENVALTHYIDNALRANYIMLLNIDYVVSEEQEILIVDQFTGRTMEGRRFSDGLHQAIEAKESVPIQEESKTSASITYQNMFRMYHKLAGMTGTGKTEEEEFREIYNMRVIPIPTNRPVQRIDHSDLLYPTLDSKFRAVVADVKERYEQGQPVLVGTVAVETSDLISRKLVAAGVPHEVLNAKNHFKEAQIIMNAGQRGAVTIATNMAGRGTDIKLGEGVRELGGLCVIGTERHESRRIDNQLRGRSGRQGDPGESQFYLSLEDDLMRRFGTDRIKVVLERMNLAEDDTVIKSKMLTRQVESAQRRVEGNNYDTRKQVLQYDDVMREQREIIYANRREVITAERDLGPELKGMIKRTIKRAVDAHSRSDKNTAAEAIVNFARSALLDEEAITVSELRGLKEAEIKELLYERALAVYEQQIAKLKDPEAIIEFQKVLILMVVDNQWTEHIDALDQLRNSVGLRGYAQNNPIVEYQSEGFRMFQDMIGSIEFDVTRTLMKAQIHEQERERASQHATTTAEQNISAQHVPMNNESPEYQGIKRNDKCPCGSGMKFKNCHGLRCLQ

SEQ ID NO: 10109 - DNA, 714 bp, Streptococcus agalactiae
atgattattttgattattgcactggcaactattttgacatttgtcacatggatgttgattcgtccaaaagctctacggtatattctaggtcttctctcattagctttgttgtttgcctcagtttggatgttaacggatcactttattaatcatacaggtatgactattgaaactaagacaaagacacgtgagatttatagtgcgggtgatagtaaggctccatttggtctcatgatttataaagagattggtactcattcgagtaataatgttttagtttatcgaacagatttaaatcaaaaagaagcaaaagctcactttgttccaaatacaaaagaagtgacaagtgctgtgaaaaaatctgctagctaccaattagctgatgtgaaaaaagccacagtaacaacaaagactaaacgttatgtgtggaaagatagtctttcgaaactactttatggctttgcaggtgaaaatggagaattgatttctcagaaatcagttgctaaaataccacgaaaaacttggctagttttgactaaagagcagtccgaacacttagaatcggctgcggctaaactaaaagaacaaatgacttcgcaagcaaaagtaaacccagtgaaagctatggagataaagacattagctaagacaaatccagaagcttatgctgagatgcaagttaaagcattaaaagaagctcttaatataaaagaa

SEQ ID NO: 10110 - protein, 238 aa, Streptococcus agalactiae
MIILIIALATILTFVTWMLIRPKALRYILGLLSLALLFASVWMLTDHFINHTGMTIETKTKTREIYSAGDSKAPFGLMIYKEIGTHSSNNVLVYRTDLNQKEAKAHFVPNTKEVTSAVKKSASYQLADVKKATVTTKTKRYVWKDSLSKLLYGFAGENGELISQKSVAKIPRKTWLVLTKEQSEHLESAAAKLKEQMTSQAKVNPVKAMEIKTLAKTNPEAYAEMQVKALKEALNIKE

SEQ ID NO: 10111 - DNA, 2811 bp, Streptococcus agalactiae
atgataagaggagcaagagctcacaatttaaaaaatataagtgtcgacattccacgagacaagttagttgtcgttacgggactatcaggatcaggtaagtctagtttggcctttgacactatctatgcagaaggacaacgtcgttacgttgaaagtctttctgcttacgcgcgccaatttttgggaaatatggaaaagcctgatgtagattctattgatggccttagtccagctatttctattgatcagaaaacaacaagtaagaatcctcgctctactgttgggactgtaacagaaattaacgattatttacgtttgctttatgctcgtgttggaaccccatattgtatcaatggtcacggagccatcacagcatcttctgtagagcaaattgtggataaggtactagcgcttccagagcgaacaaagatgcaaattttagccccaattatacgtcgaaaaaaaggacaacacaaatcaacatttgagaaaatacaaaaagatggttacgttcgtgttcgtattgatggtgatattcacgatgttactgaggtgcctgaattatcaaaaagtaagatgcacaatattgatattgtagtagatcgattaattaataaagagggcattcgttcccgcttatttgattccgttgaagcggctctacgtttgtcggatggttatgtcgttattgatacaatggatggcaatgagttattgttttcagaacattattcttgtcctgaatgtggttttactgttcctgaattagagccacgccttttttcttttaatgctccctttggttcttgtccgacctgtgatggcttaggaattaagttagaagtagatatagatttggttattccagatagaagtaagacccttagagaaggggccttagttccttggaatccaatttcatcaaattattatccaacgatgctagagcaagctatgactcaatttggtgttgatatggatacgccatttgaaaaattaagcaaggcggagcaggacctagccctatatggttcaggcgaacgagagttccatttccattatattaacgattttggaggcgagagaaatattgatttgccttttgaaggggttgtcaataatattaatcgtcgttaccatgaaactaatagcgattacacacgcaatgttatgcgagaatatatgaacgagctaaaatgtaacacttgtcatggctatcgtctcaatgatcaagcactttgcgtaagagttgggggagaagaaggtcttaatattgggcaagtctcagatttatcgatagcagaccatttagaacttttagaaacattgcgtttatcttcaaatgaacaattaattgctcgaccaattatcaaagaaatccatgaccgtctaagtttcttaaataatgttggacttaattatttaaatctgtcacgttctgcaggaacactttccgggggcgagagtcaacgtattcgtttggctactcaaattgggtctaatttatcaggtgtcctttatgtacttgatgagccgtccattggacttcatcagcgagacaatgaccgtttgattgatagtcttaagaaaatgcgtgatttgggtaatacgcttattgttgttgaacatgatgaagatacaatgatggcagctgattggttaatcgatgtgggacctggcgctggtgcgtttggtggtgagattgtggcctctggtacaccgaagcaagtagctaaaaatactaaatctattacaggacaatatttgtcaggtaagaaagtgattcctgtgccatctgaacgaagagtaggtaatggtcgctttttagaaatcaaaggtgcggcagaaaacaacctacaaaatttagatgtcaagttccctctcggtaaatttattgccgtaactggtgtctcaggttctggaaaatcaaccttaattaatagtattttgaaaaaagctgttgcgcagaagcttaaccgtaactcagataaaccaggtaaatatgtttctttagaaggcattgaatatgttgatcgattgattgatattgatcaaagtccaattggtcggactccacgttctaatcccgcaacctatacaggtgtttttgatgatattcgtgatctttttgctcaaactaatgaggcaaagattcgaggttataaaaaaggacgcttctcatttaacgtcaaaggtggacgttgtgagtcttgttctggcgatggtatcatcaaaattgagatgcattttttaccagatgtctacgttccttgtgaagtatgccacggcacgcgctataatagtgagactctggaagtacattacaaagaaaaaaatattgcacaaattcttgatatgacagtgaatgatgcagttacattttttgcagctattcctaaaattgctcgtaagttacagactattaaggatgttggtttgggatatgtcactttggggcaaccagctacaaccttatcaggaggagaagctcagcgaatgaagctggcaagtgaattacataagcgttcgacaggtaagagtctttacatattagacgaaccaacaacggggcttcatgcagatgatattgctcgtttacttaaggttttggatcgttttgtagatgatggtaatacagtgcttgttattgagcataaccttgatgttattaaaactgctgaccacattattgatcttggccctgaaggaggtattggtggcggacaaattgtagctatcggaacaccagaagaagttgctgaaaatcctaaatcctatacaggatattatttaaaagagaagttagcaaga

SEQ ID NO: 10112 - protein, 937 aa, Streptococcus agalactiae
MIRGARAHNLKNISVDIPRDKLVVVTGLSGSGKSSLAFDTIYAEGQRRYVESLSAYARQFLGNMEKPDVDSIDGLSPAISIDQKTTSKNPRSTVGTVTEINDYLRLLYARVGTPYCINGHGAITASSVEQIVDKVLALPERTKMQILAPIIRRKKGQHKSTFEKIQKDGYVRVRIDGDIHDVTEVPELSKSKMHNIDIVVDRLINKEGIRSRLFDSVEAALRLSDGYVVIDTMDGNELLFSEHYSCPECGFTVPELEPRLFSFNAPFGSCPTCDGLGIKLEVDIDLVIPDRSKTLREGALVPWNPISSNYYPTMLEQAMTQFGVDMDTPFEKLSKAEQDLALYGSGEREFHFHYINDFGGERNIDLPFEGVVNNINRRYHETNSDYTRNVMREYMNELKCNTCHGYRLNDQALCVRVGGEEGLNIGQVSDLSIADHLELLETLRLSSNEQLIARPIIKEIHDRLSFLNNVGLNYLNLSRSAGTLSGGESQRIRLATQIGSNLSGVLYVLDEPSIGLHQRDNDRLIDSLKKMRDLGNTLIVVEHDEDTMMAADWLIDVGPGAGAFGGEIVASGTPKQVAKNTKSITGQYLSGKKVIPVPSERRVGNGRFLEIKGAAENNLQNLDVKFPLGKFIAVTGVSGSGKSTLINSILKKAVAQKLNRNSDKPGKYVSLEGIEYVDRLIDIDQSPIGRTPRSNPATYTGVFDDIRDLFAQTNEAKIRGYKKGRFSFNVKGGRCESCSGDGIIKIEMHFLPDVYVPCEVCHGTRYNSETLEVHYKEKNIAQILDMTVNDAVTFFAAIPKIARKLQTIKDVGLGYVTLGQPATTLSGGEAQRMKLASELHKRSTGKSLYILDEPTTGLHADDIARLLKVLDRFVDDGNTVLVIEHNLDVIKTADHIIDLGPEGGIGGGQIVAIGTPEEVAENPKSYTGYYLKEKLAR

SEQ ID NO: 10113 - DNA, 942 bp, Streptococcus agalactiae
atgaagcaaatgtttctttcaacggcaattgaatttaaagaaattgaaacattcgagccaggtgcttggataaatctggttaatccctcccaggaagaatccgaacaagtagctgatcaatttggtattgatattgatgatttacgtgctcccctcgatgtggaagaaacttcccgtatctcggttgaagatgattatactttagttattgttgacgttcctacctatgaagaacgcaataacaaaagttattatatgactattcctatgggcattatcgttactgacaacgctgttattactacttgcctagaacatttgacgctgtttgatcacttttatagacgacgtgtcaaaaatttttatacctttatgaagacacgttttgttttccaattgctttatcgcaatgccgaattatacttacaggctttgcgtactatcgataggcagagcgataaaattgaagcacaactagagagtgcaactcgaaatgagcaattgatcgatatgatggaattggaaaaatctattgtctatctaaaggcctctttaaaatttaatgagcgaatcgtcaaaaaattgaccagtagtaccagtagtttaaaaaaatacattgaagatgaagatctgcttgaagatacattgatcgaaactcagcaggctattgaaatggcaaatatctatgaaaatgtcttaaatgccatgacagaaacgactgcttcaatcatcggtaataatcagaataccattatgaaaaccttagccctagtaactatgacattggatattccaacggttattttttcggcgtatgggatgaactttcaaaataattggatgcctttgaatggtctcgcacatggctttatctatgttgttcttttggcctttttgatgagttcatttgttgtattttattttattcgtaaaaaatggttt

SEQ ID NO: 10114 - protein, 314 aa, Streptococcus agalactiae
MKQMFLSTAIEFKEIETFEPGAWINLVNPSQEESEQVADQFGIDIDDLRAPLDVEETSRISVEDDYTLVIVDVPTYEERNNKSYYMTIPMGIIVTDNAVITTCLEHLTLFDHFYRRRVKNFYTFMKTRFVFQLLYRNAELYLQALRTIDRQSDKIEAQLESATRNEQLIDMMELEKSIVYLKASLKFNERIVKKLTSSTSSLKKYIEDEDLLEDTLIETQQAIEMANIYENVLNAMTETTASIIGNNQNTIMKTLALVTMTLDIPTVIFSAYGMNFQNNWMPLNGLAHGFIYVVLLAFLMSSFVVFYFIRKKWF

SEQ ID NO: 10115 - DNA, 312 bp, Streptococcus agalactiae
atggcattagaagtaacagatgctacatttgtagaagaaactaaagaaggtttagtactcattgatttttgggcaacttggtgtggtccatgtcgtatgcaagcaccaatcttagaacagttatctcaagaaatcgatgaagatgaactcaaaattttgaaaatggatgttgatgagaatccggaaactgcccgtcagtttggtattatgtcaattccaacattgatgtttaaaaaagacggagaagtggttaaacaagttgcaggtgttcatactaaagaccaactgaaagctattattgctgaattgagt

SEQ ID NO: 10116 - protein, 104 aa, Streptococcus agalactiae
MALEVTDATFVEETKEGLVLIDFWATWCGPCRMQAPILEQLSQEIDEDELKILKMDVDENPETARQFGIMSIPTLMFKKDGEVVKQVAGVHTKDQLKAIIAELS

SEQ ID NO: 10117 - DNA, 2346 bp, Streptococcus agalactiae
atgaagagtatgaataacaagattttagaacagttagaatttaacaaagttaaggaattgatattaccttatctcaagacagaacaatcacaagaagaattatcagagctggagccgatgacggaggctcctaaaatagaaaaaagttttaatgaaatttctgacatggaacagatttttgttgaacatcactcatttggcatagtcagcctaagttcaatctctgagagtttaaaacgcttagagctttcagctgatcttaatattcaagaacttttggctatcaaaaaagttttacagagttcttcggatatgattcacttttattctgatttggataatgtttctttccaatctttggatcgtttgtttgaaaatttggaacaattccctaatctgcaagggtcttttcaagctatcaatgatggtggttttttagaacattttgcgagtccagaattagagcgtatccgtcgtcaattaacaaacagtgaacgacgggttcgtcagattttacaggatatgcttaaggaaaaagcagagcttttatcagagaatctaatcgctagtcgtagtggacgaagtgtcctaccagtaaaaaatacttatcggaatcgtatttctggtgtggttcatgacatctcttcttcaggaagtactgtttatattgagcctcgtgctgtagttacactaaacgaagagataacgcagcttagagctgacgaacgtcatgaagaaagtcgtattttacacgcattttcagacttgttaagaccccatgtcgccactattagaaataatgcatggattcttgggcatcttgattttgtaagggctaaatatctttttatgtctgataataaggcgacgatacctgagatttctaatgacagcacgttagcattaatcaatgttcgtcatcctctgttaagtaaccctgtggctaatgacttacattttgatcaagatttaactgcaattgtcatcactggtcccaatactggtggtaagacgattatgctaaaaacactcggtttagcacaattaatgggacagtctggtttgccagtattagcggataaaggtagtaaaattgcagtatttaacaatatctttgcagatattggcgatgagcaatctattgaacaaagtctatcaactttttctagtcatatgacgcacatagtcagtattttaaacgaggctgaccacaatagtttagtcctctttgatgaactgggagcaggaacggatcctcaagaaggtgctagtttggctatggctattttagaacaccttaggttaagtaatatcaaaacgatggcgaccacgcactatccagaattaaaagcttatgggattgagacaaattttgtagagaatgcgagcatggaatttgatgccgaaacgcttagccctacgtatcgctttatgcaaggagttcctggacgatcaaatgcatttgaaattgcttctcgccttggtttagctccatttattgttaaacaagctaagcagatgacagattctgactcagatgttaaccgtattattgaacagttagaggcacagacacttgagacacgtagaagactggatcatattaaagaagttgaacaagaaaacctcaaattcaatcgtgcggttaagaaactctataatgaattttcacatgagcgcgataaagagttagaaaaaatctatcaagaagctcaagaaattgtagatatggctttgaatgagagtgatactatcttaaaaaaactcaatgataagagccaattaaaacctcacgaaattatagatgctaaggcacaaataaaaaaattagcacctcaagttgatttatcaaaaaataaagtcttaaataaggctaaaaaaattaaagcagctcgtgctcctagaattggtgatgatattatagtgactagctatggacagcgaggtaccttaactagtcaattaaaagatggacgttgggaagcacaagtgggaattatcaaaatgacattaacacaagatgaatttacccttgttagagtccaagaagaacagaaagtcaaaagtaaacagattaatgtggttaaaaaggctgatagttctggaccaagagctcgacttgatcttagaggtaaaagatacgaagaagctatgcaagagttagataattttattgatcaagcattgcttaacaatatgggacaagttgatatcattcatggtattggtacaggcgttatccgtgagggagtgacaaaatatcttcgtcgtaataagcacgttaagcattttgcttatgccccacaaaatgcagggggatctggcgccacaattgtaacgttaggg

SEQ ID NO: 10118 - protein, 782 aa, Streptococcus agalactiae
MKSMNNKILEQLEFNKVKELILPYLKTEQSQEELSELEPMTEAPKIEKSFNEISDMEQIFVEHHSFGIVSLSSISESLKRLELSADLNIQELLAIKKVLQSSSDMIHFYSDLDNVSFQSLDRLFENLEQFPNLQGSFQAINDGGFLEHFASPELERIRRQLTNSERRVRQILQDMLKEKAELLSENLIASRSGRSVLPVKNTYRNRISGVVHDISSSGSTVYIEPRAVVTLNEEITQLRADERHEESRILHAFSDLLRPHVATIRNNAWILGHLDFVRAKYLFMSDNKATIPEISNDSTLALINVRHPLLSNPVANDLHFDQDLTAIVITGPNTGGKTIMLKTLGLAQLMGQSGLPVLADKGSKIAVFNNIFADIGDEQSIEQSLSTFSSHMTHIVSILNEADHNSLVLFDELGAGTDPQEGASLAMAILEHLRLSNIKTMATTHYPELKAYGIETNFVENASMEFDAETLSPTYRFMQGVPGRSNAFEIASRLGLAPFIVKQAKQMTDSDSDVNRIIEQLEAQTLETRRRLDHIKEVEQENLKFNRAVKKLYNEFSHERDKELEKIYQEAQEIVDMALNESDTILKKLNDKSQLKPHEIIDAKAQIKKLAPQVDLSKNKVLNKAKKIKAARAPRIGDDIIVTSYGQRGTLTSQLKDGRWEAQVGIIKMTLTQDEFTLVRVQEEQKVKSKQINVVKKADSSGPRARLDLRGKRYEEAMQELDNFIDQALLNNMGQVDIIHGIGTGVIREGVTKYLRRNKHVKHFAYAPQNAGGSGATIVTLG

SEQ ID NO: 10119 - DNA, 858 bp, Streptococcus agalactiae
ttgcaagaaaagataagaaccgatttagctcaacatcatataagtaataacaatccttatgtggtattttcagctaaaatatcaggagctactgttcttttatatacttctggaaaacttgtcttccagggttctaacgcttcacatatcgcccaaaagtatggttttattgagcaaaaagaaagttgttcctctgagagtcaagatattcccataattggtactgatgaagtgggaaatggctcttactttggtggactggcagtggtagctagttttgtaactcctaaggaccatgcttacctcaaaaaattaggtgttggtgattcaaaaacacttactgatcaaaaaattaagcaaatcgcgcctcttttggaaaaagcaattccacacaaagcattattgttatcgcctcaaaaatataatcaagtggttagtccaaataacaaacataatgctgtctccgtaaaagttgctttacacaatcaagctatcttccttcttcttcaagatggttttgaaccagaaaaaatcgttattgatgcttttactagctccaaaaactatcaaaattatttgaaaaatgaaaagaatcaatttaaacaaacgattactctggaagaaaaagctgaaaataaatatctagctgtagcggtcagttctattattgcacgtaatctattcttagaaaaccttaacaaattaagcgacgacgtaggatataaacttccaagtggagctggtcaccaatctgataaggtcgctagccaattactcaaagcttatggtatctcttcgcttgaacactgcgcaaaacttcattttgccaacaccaaaaaagcacaagcattattaaaa

SEQ ID NO: 10120 - protein, 286 aa, Streptococcus agalactiae
MQEKIRTDLAQHHISNNNPYVVFSAKISGATVLLYTSGKLVFQGSNASHIAQKYGFIEQKESCSSESQDIPIIGTDEVGNGSYFGGLAVVASFVTPKDHAYLKKLGVGDSKTLTDQKIKQIAPLLEKAIPHKALLLSPQKYNQVVSPNNKHNAVSVKVALHNQAIFLLLQDGFEPEKIVIDAFTSSKNYQNYLKNEKNQFKQTITLEEKAENKYLAVAVSSIIARNLFLENLNKLSDDVGYKLPSGAGHQSDKVASQLLKAYGISSLEHCAKLHFANTKKAQALLK

SEQ ID NO: 10121 - DNA, 1092 bp, Streptococcus agalactiae
atgttaatttttcctttaataaatgatacgtcgcgtaaaattatccacattgatatggatgctttttttgcatctgtggaagagcgtgacaatccctctcttaaaggaaagcctgttattattggttctgatcccagaaaaaccggcggcagaggggttgtttctacttgtaattatgaggctcgaaagtttggagttcattcagctatgtcttcaaaagaagcgtatgaacgatgccctcaagctatctttatttcgggaaattaccaaaaatatcgccaagtaggaatggaagtacgagatatatttaaaaagtatacggatttggttgaaccgatgagtatagacgaagcttatttagatgtaactgaaaataaaatgggaataaaatcagctgttaaacttgctaaaatgatacaatacgatatttggaatgatgtccatttgacctgttcagcgggtatttcctacaataaatttttggcaaaattggcttctgactttgagaaaccaaaaggacttaccctcatcctaccagatcaagctcaagatttcttgaagcccttaccaatagagaaatttcatggtgttggtaaacgctccgtcgaaaaattacatgctttaggggtttatactggtgaggacctcctttccttatctgaaatttctttaattgatatgtttggtcgtttcgggtatgacctttatcgtaaggcaagagggattaatgcttccccggtaaaacctgatagagttcgtaaatcaataggaagtgagaaaacctatgggaaattactatataacgaagcagatatcaaagctgagatttcaaagaacgttcagagagttgttgcttctctggagaaaaataagaaagttggtaagacaatcgttttaaaagttagatatgcggattttgaaacattgacgaaacgtatgacattagaagagtatactcaagattttcaaatcattgatcaagttgctaaagcgatatttgataccttagaagagtcagtttttggcatacgactcttaggtgttacagtaacgaccctggaaaatgaacatgaagctatctatttagatttt

SEQ ID NO: 10122 - protein, 364 aa, Streptococcus agalactiae
MLIFPLINDTSRKIIHIDMDAFFASVEERDNPSLKGKPVIIGSDPRKTGGRGVVSTCNYEARKFGVHSAMSSKEAYERCPQAIFISGNYQKYRQVGMEVRDIFKKYTDLVEPMSIDEAYLDVTENKMGIKSAVKLAKMIQYDIWNDVHLTCSAGISYNKFLAKLASDFEKPKGLTLILPDQAQDFLKPLPIEKFHGVGKRSVEKLHALGVYTGEDLLSLSEISLIDMFGRFGYDLYRKARGINASPVKPDRVRKSIGSEKTYGKLLYNEADIKAEISKNVQRVVASLEKNKKVGKTIVLKVRYADFETLTKRMTLEEYTQDFQIIDQVAKAIFDTLEESVFGIRLLGVTVTTLENEHEAIYLDF

SEQ ID NO: 10123 - DNA, 2310 bp, Streptococcus agalactiae
atggcaacagttaaaacaaacacagatatctttgaacaagcttgggaaggctttaaaggtgttgattggaaagaaaaagcaagtattgctcgcttcgttcaagcaaactatgcaccttacgatggagatgaaagcttcttagctggagcaactgaacgttcacttcacatcaaaaaagtgattgaagaaacaaaagctcactatgaagaaactcgcttcccaatggatactcgtgttgcttcaatttctgaattaccagctggttttatcgacaaagataacgagcttatctttggtattcaaaacgacgagcttttcaaattgaacttcatgcctaaaggtggtatccgtatggcggaaactacacttaaagaaaatggttatgaacctgatccagctgttcacgaaatcttcactaagtacgctacaacagtaaatgatggtatcttccgcgcttatacttctaacattcgtcgtgctcgccatgcacacactgttactggtcttccagacgcttattcacgcggacgtatcattggtgtatatgctcgtctagctgtttacggtgctgactacttgatgcaagaaaaagttaatgactggaatgcattgaatgatattgatgaagagtcaattcgtcttcgtgaagaaatcaaccttcaataccaagctcttggtgaagttgtaaaacttggtgacctttacggcgtagatgttcgtaaaccagccatgaacactaaagaagccattcaatgggtgaacattgctttcatggctgtatgtcgtgttatcaatggtgctgcaacatcacttggacgtgttcctattgtccttgatatctttgcagaacgtgacctcgctcgcggtacattcacagaatcagaaatccaagaatttgttgatgattttgtccttaaactccgtactgtaaaatttgctcgtactaaagcttatgatgccctttactcaggtgacccaacctttatcacaacttcaatggcaggtatgggagctgatggacgtcatcgtgttaccaaaatggactatcgtttcttaaatacacttgacaatatcggtaactcaccagaaccaaacttaactgttctttggtcagatcaattaccatatgctttccgtcgctactgtatgtcaatgagtcataaacactcttcaatccaatatgaaggtgtatcaacaatggctaaagaaggctacggtgaaatgtcatgtatttcatgttgtgtatctccacttgatccagaaaacgaagacaaacgtcacaaccttcaatattttggtgctcgtgttaacgttatgaaagcacttcttactggtcttaacggtggttatgatgatgttcataaagattacaaagtatttgacatcgacccaattcgtgacgaagtactcaactttgacactgtaaaagctaactttgaaaaatctcttgactggttgactgatacttatgttgatgcgatgaatatcatccactacatgactgataaatacaactatgaagctgtacaaatggcattcttaccttcacatgtacgtgctaatatgggatttggtatctgtggttttgcaaatactgtcgattcattatctgcgattaaatacgctactgttaaaccaatccgtgacgaagatggttacatctacgactacgaaacagttggtgacttcccacgttatggtgaagatgatgatcgtgttgactcaatcgctgaatggttacttgaagccttccatggacgccttgctaaacacaaactttataaagatgctgaagcaactgtttctcttcttacaatcacatcaaacgttgcttactctaaacaaactggtaactcaccggtacataaaggagtatatctcaatgaagatggtagtgtaaacctttctaaagtagaattcttctcaccaggtgctaacccttctaacaaagctaaaggtggctggttacaaaacttgaattcactttctaaacttgatttcgctcatgcaaatgatggtatttcattgacaactcaagtttctccacgcgctcttggtaaaacatttgatgaacaagttgataacttggtaacagtccttgatggttactttgaaaacggtggtcaacacgttaacttgaatgtcatggaccttaaagatgtctatgacaagattatgaatggtgaagatgttatcgttcgtatctcaggttactgtgtcaatactaaatatctaactcctgagcaaaaaactgagttgacacaacgtgtcttccatgaagtactttcaatggacgatgcattaactaac

SEQ ID NO: 10124 - protein, 770 aa, Streptococcus agalactiae
MATVKTNTDIFEQAWEGFKGVDWKEKASIARFVQANYAPYDGDESFLAGATERSLHIKKVIEETKAHYEETRFPMDTRVASISELPAGFIDKDNELIFGIQNDELFKLNFMPKGGIRMAETTLKENGYEPDPAVHEIFTKYATTVNDGIFRAYTSNIRRARHAHTVTGLPDAYSRGRIIGVYARLAVYGADYLMQEKVNDWNALNDIDEESIRLREEINLQYQALGEVVKLGDLYGVDVRKPAMNTKEAIQWVNIAFMAVCRVINGAATSLGRVPIVLDIFAERDLARGTFTESEIQEFVDDFVLKLRTVKFARTKAYDALYSGDPTFITTSMAGMGADGRHRVTKMDYRFLNTLDNIGNSPEPNLTVLWSDQLPYAFRRYCMSMSHKHSSIQYEGVSTMAKEGYGEMSCISCCVSPLDPENEDKRHNLQYFGARVNVMKALLTGLNGGYDDVHKDYKVFDIDPIRDEVLNFDTVKANFEKSLDWLTDTYVDAMNIIHYMTDKYNYEAVQMAFLPSHVRANMGFGICGFANTVDSLSAIKYATVKPIRDEDGYIYDYETVGDFPRYGEDDDRVDSIAEWLLEAFHGRLAKHKLYKDAEATVSLLTITSNVAYSKQTGNSPVHKGVYLNEDGSVNLSKVEFFSPGANPSNKAKGGWLQNLNSLSKLDFAHANDGISLTTQVSPRALGKTFDEQVDNLVTVLDGYFENGGQHVNLNVMDLKDVYDKIMNGEDVIVRISGYCVNTKYLTPEQKTELTQRVFHEVLSMDDALTN

SEQ ID NO: 10125 - DNA, 657 bp, Streptococcus agalactiae
atgaatcatcaaattttacaaaattacattaatagtcataatcttccaattatcgaaaaagactaccataaataccttacatttgaaagtttagaagaagactatacttatatcctaaaagatggtattgttaaacaaagtgttctctctaaatatggtactgagttcaatctgcgttatgtgacaggcttagaaatcacttctatcctaaatacagactactcccaacacatgggagaaccttacaacgttcgaatcgaatccgaaactgcccacttttacaaagtacgtcgctctaccttcctaaaagatatcaataatgatattgaactgcaaggatatgtgaaagatttctatcataaccgccttgaaaaatctatgaaaaaaatgcaatgtatgctcactaatggtcgaattggtgctatctccacacaattatatgacctcagtaagatgtttggtgaagaacgagataacggtgatatctatattaattttgttatcacgaacgaagaacttggtaaattttgcggaatatccacaggaagtagcgtgagccgcattttgaaacaactaaaagacgatcatattattcgtattgaaaaacaacatatcattattacaaatgttgagaaattaaaagatcatattgtattt

SEQ ID NO: 10126 - protein, 219 aa, Streptococcus agalactiae
MNHQILQNYINSHNLPIIEKDYHKYLTFESLEEDYTYILKDGIVKQSVLSKYGTEFNLRYVTGLEITSILNTDYSQHMGEPYNVRIESETAHFYKVRRSTFLKDINNDIELQGYVKDFYHNRLEKSMKKMQCMLTNGRIGAISTQLYDLSKMFGEERDNGDIYINFVITNEELGKFCGISTGSSVSRILKQLKDDHIIRIEKQHIIITNVEKLKDHIVF

SEQ ID NO: 10127 - DNA, 1746 bp, Streptococcus agalactiae
atgtttaaaatccctttgtttaaagaattaaagacagatcaatggataaaaccatttttcaaacaatataaagtttccttagtaattgctcttttccttggttttatgactttcttttctgccagtgctcttatgtttaattcgggctatctgattagtaagtcagcttcactaccgagtaatattcttctagtatatgttccaattgtactaacacgtgcttttggcattggacgtcctgtttttcgttatatagaacgcctaacgagtcacaattgggtattacgaatgacttcacagctgcgcttgaagctttaccattccttagaaagcaatgctatctttatgaagcgtgattttcgtttaggagatgttatggggcttttagcggaggatattaattatttgcaaaatttgtatcttaggacaatatttccaacgattatagcgtggatattatatagctttattattattgcaacaggcttcttttctctatggtttgctttaatgatgttgctttatttagctattatgatttttctttttccactttggtcgattttagctaatggtgctcgtcagactcgtgaaaaagaattaaaaaatcatctttatactgatttgacggataatgtcttaggtatttcagactggatttttagtcaacgtggtcaagagtacgtcgccttgcatgagcgttcggaaagtgaactcatggctgttcagaaaaaaattcgttcctttgataatcgtagagctcttattgtggaattagtttttggctttctagctattttggttattatttgggctagtaatcagtttattggtcacagaggtggcgaagctaactggattgcagcatttgttctaacagtatttcccttgtcagaggcatttgctggtttgtctgctgctgctcaagaaacaaataaatattctgattcaattcatcgtcttaatgaattatcagaaacgtattttgaaacaactcaaaatcagttgcctaataagccatacgatttttccgtcaagaatttaagtttccagtataagccacaagagaaatgggttttgcatcatttagatttggatattaaagaaggagaaaaaattgctattttagggcgtagtggttctggcaagagtaccttagccagtctacttcgtggcgacttgaaagcaagtcaaggggagattaccctaggcgatgctgatgtttcaatagttggtgattgcatttctaactatattggagtgatacaacaagcgccctacctttttaatacaaccctgctaaataacattcgcattggaaaccaagatgctagtgaagaagatgtatggaaagttcttgaacgagttggattgaaagagatggtcactgatttatcagatggtctctatacaatggttgatgaagctggacttaggttttcaggtggcgaaaggcatagaattgctttggctagaatcttactaaaagatgtcccaattgttatcttagatgagccaactgttggacttgatcctattactgaacaagccttactaagggtatttatgaaagaattggaaggtaagaccttagtttggattacacatcacttaaaaggtattgaacatgctgatcgtatcttatttatagaaaatgggcaattagagttggaaggttctcctcaagaattgtctcaaagtagccaacgttaccgtcagctgaaagcctctgatgatggtgatcta

SEQ ID NO: 10128 - protein, 582 aa, Streptococcus agalactiae
MFKIPLFKELKTDQWIKPFFKQYKVSLVIALFLGFMTFFSASALMFNSGYLISKSASLPSNILLVYVPIVLTRAFGIGRPVFRYIERLTSHNWVLRMTSQLRLKLYHSLESNAIFMKRDFRLGDVMGLLAEDINYLQNLYLRTIFPTIIAWILYSFIIIATGFFSLWFALMMLLYLAIMIFLFPLWSILANGARQTREKELKNHLYTDLTDNVLGISDWIFSQRGQEYVALHERSESELMAVQKKIRSFDNRRALIVELVFGFLAILVIIWASNQFIGHRGGEANWIAAFVLTVFPLSEAFAGLSAAAQETNKYSDSIHRLNELSETYFETTQNQLPNKPYDFSVKNLSFQYKPQEKWVLHHLDLDIKEGEKIAILGRSGSGKSTLASLLRGDLKASQGEITLGDADVSIVGDCISNYIGVIQQAPYLFNTTLLNNIRIGNQDASEEDVWKVLERVGLKEMVTDLSDGLYTMVDEAGLRFSGGERHRIALARILLKDVPIVILDEPTVGLDPITEQALLRVFMKELEGKTLVWITHHLKGIEHADRILFIENGQLELEGSPQELSQSSQRYRQLKASDDGDL

SEQ ID NO: 10129 - DNA, 390 bp, Streptococcus agalactiae
ttgaaacttggtcttgtctcagcaatgtttgctggaggagcattcgtagctcttggttctacacaaggtgtttcagcttcaactttcacagcaccgcaagcaacacctccaaaagcagaacgtcagttaacggattcagaactttatgaacgtgcccaaaaacaagtattgccaagatatatccaaggttctctctcaggtatccttaaccagcattcaacactttacaaacaacaaaatgcagcagtgacaccgcaagtatcaagccccaaatcagaacgtcagttaacagattcagaaatctatgaacgtgctcaaaaacaagtattgccaaattatattcaaggttctctctcaggtatcctcaaccaacattcaactttaaatgct

SEQ ID NO: 10130 - protein, 130 aa, Streptococcus agalactiae
MKLGLVSAMFAGGAFVALGSTQGVSASTFTAPQATPPKAERQLTDSELYERAQKQVLPRYIQGSLSGILNQHSTLYKQQNAAVTPQVSSPKSERQLTDSEIYERAQKQVLPNYIQGSLSGILNQHSTLNA

SEQ ID NO: 10131 - DNA, 534 bp, Streptococcus agalactiae
atgacagttgaaaagacggttagtgaattagctgaaattttaggggttagtcgtcaagcgatgaataacagagttaaaacactccctgaagaatgtgtggaaaagaatagtaaaggcgttacagttgttaatcgtgatggcttgattaaattggaagaaatctataaaaaaactattttggaagaggaaccaattgacgaagaagcatcaagacgagaacttttagaaattctcgttgatgagaagaatactgaaatcacacgtttatatgaacagttaaaagcaaaagatattcagattgcttcaaaagacgagcagttacatgtaaaagatattcaaatagcagagaaagataagcaattagatcaacaacagcaattgactttaactgctatggaagatacgcaacgtctgcaacttgagttaaatgaagctaaagcagaggttgaggagattcaagaagccaaagaagaaaaaattcaagaattagaagctgttaaaaaaagtttctttggacgtttcttcaataaaaaa

SEQ ID NO: 10132 - protein, 178 aa, Streptococcus agalactiae
MTVEKTVSELAEILGVSRQAMNNRVKTLPEECVEKNSKGVTVVNRDGLIKLEEIYKKTILEEEPIDEEASRRELLEILVDEKNTEITRLYEQLKAKDIQIASKDEQLHVKDIQIAEKDKQLDQQQQLTLTAMEDTQRLQLELNEAKAEVEEIQEAKEEKIQELEAVKKSFFGRFFNKK

SEQ ID NO: 10133 - DNA, 1125 bp, Streptococcus agalactiae
atgatggcagctatttcctcaaatttttacggcaacaaaacacttcttattgagaaaaataaacgtttaggcaaaaaactagctggaacaggtggtggccgctgtaatgttaccaataatggaaaccttgatgagctcttagctggtatacctggaaatggccgtttcctatatagcgtcttctcacaatttgataaccatgatattattaacttctttcaagacaacggcgtcacactaaaagaagaagatcatgggcgtatgttccctactactgataaatctcgtactatcattaacgcccttgaaaataaaataaaagaacttggtggtcaaattatgactgacacagaagttgtctctgtcaaaaagataggagattcattctatatcaaaactaaagatacacagttcgcatccgataaacttatcgtaacaactggtggtaaatcctatccgtctacaggttctactggtttcggtcatgacattgctcgtcactttaaattagaagtcacagatatggaagccgccgaaagccctcttttaactgattttccccataaaaaactacaaggtatctccttagatgatgtcactttgtcatttgaaaagcatattattacacacgatcttctctttactcattttggattatcaggaccagcagccttgcgaatttctagctttgtcaaaggcggagaaactatatacctagatgttttgcccaatatctctgttaaagaattggaaatacacttccaaaatgaaagagaaaaatctttgaaaaacgctcttaaaatacttcttcctgagcgtttagctgaattttacgctgaagacttacccgaaaaagtaaaacaagtatctgtaaaagacttagaaatgttaattcaaaaacttaaaaaacttcctattttagtaactggcaagatgtctctagcaaaatcctttgtaacaaaagggggagttgatcttaaagaaataaaccccaaaacacttgaaagtaaaaaggtagctggtttacattttgctggtgaagtcctagacatcaatgctcatacgggagggtttaacattacttctgccttatgtacaggctgggtagctggtagcttacactat

SEQ ID NO: 10134 - protein, 375 aa, Streptococcus agalactiae
MMAAISSNFYGNKTLLIEKNKRLGKKLAGTGGGRCNVTNNGNLDELLAGIPGNGRFLYSVFSQFDNHDIINFFQDNGVTLKEEDHGRMFPTTDKSRTIINALENKIKELGGQIMTDTEVVSVKKIGDSFYIKTKDTQFASDKLIVTTGGKSYPSTGSTGFGHDIARHFKLEVTDMEAAESPLLTDFPHKKLQGISLDDVTLSFEKHIITHDLLFTHFGLSGPAALRISSFVKGGETIYLDVLPNISVKELEIHFQNEREKSLKNALKILLPERLAEFYAEDLPEKVKQVSVKDLEMLIQKLKKLPILVTGKMSLAKSFVTKGGVDLKEINPKTLESKKVAGLHFAGEVLDINAHTGGFNITSALCTGWVAGSLHY

SEQ ID NO: 10135 - DNA, 765 bp, Streptococcus agalactiae
gtgagtagtcatgaagcaggagccatagaattttcagggcataaggtattgactttaccttctcataatgggaaattactcgcaagcgaagtcgcaacttatattgagactttttatgctgatggtaattaccaacacatggtttttccaggaatggtttatatatcacatccaacagaatatggaacactttatagtaaagcagaactagaagagttatcgaagatttgtaaacattatcaaatccccttatttattgacggtgctcgtctggggtatggtttggctgcgaaagatacagatgttgatttcccaacgattgcagccttatcagatgttttttatattggtggaaccaaaatgggggctcttgctggggaagcagttgttttcacaaagaaaaatcgtccaaaacagtttactacaattgtaaagcagcatggtgcgttattagccaagggaagattgctggggcttgcttttgatcgtttctttacggataacctttacttaaaaattggaaagcatgcgatcgacttagcagaggaattaaaaatcattttagaagaaaaaggttactcattctatttaaaatcaccaactaatcaacaatttattattgtagaaaatacaaaactagcagatttagcaaagaatgtagcttatagtttttgggaaaaatatgatgaccatcatactgtaatacgtctagcaactagttggtcaactagtcgcgaagatgtaactgctttaagaaatgtcttg

SEQ ID NO: 10136 - protein, 255 aa, Streptococcus agalactiae
MSSHEAGAIEFSGHKVLTLPSHNGKLLASEVATYIETFYADGNYQHMVFPGMVYISHPTEYGTLYSKAELEELSKICKHYQIPLFIDGARLGYGLAAKDTDVDFPTIAALSDVFYIGGTKMGALAGEAVVFTKKNRPKQFTTIVKQHGALLAKGRLLGLAFDRFFTDNLYLKIGKHAIDLAEELKIILEEKGYSFYLKSPTNQQFIIVENTKLADLAKNVAYSFWEKYDDHHTVIRLATSWSTSREDVTALRNVL

SEQ ID NO: 10137 - DNA, 405 bp, Streptococcus agalactiae
atggaatcatcagaacaagcactggctatatggagcgtactatctgatgtctatgacaaatctccgtggagtttatcgcagatttcagaagatttaaaaaaagattcaacagattatttttttgtttataatgacggtgaagtcattggttttttggctcttcaacaattggtaggtgaagtagaaattactaatattgctgttaaaaaaaattatcaaggtaaaggttatgcttaccagttaatgtcaatgatcgctgatatagaggtgccagtttttcttgaggttcgttattcaaatatcgtagcacaaaaactttatgagaggtgtggttttgtagttttaagaaagcgcaaaaattattaccatgatccaattgaagatgctatagtgatgcgcaaggga

SEQ ID NO: 10138 - protein, 135 aa, Streptococcus agalactiae
MESSEQALAIWSVLSDVYDKSPWSLSQISEDLKKDSTDYFFVYNDGEVIGFLALQQLVGEVEITNIAVKKNYQGKGYAYQLMSMIADIEVPVFLEVRYSNIVAQKLYERCGFVVLRKRKNYYHDPIEDAIVMRKG

SEQ ID NO: 10139 - DNA, 780 bp, Streptococcus agalactiae
atgataaaaatatttgatacccatacccaccttaacgtagaaaattttgaaggaaagatagacgaggaaattaatttagctagcgaactcggtgttacaaaaatgaatgttgtcggctttgaccaagataccatttcaaaatctttggaattatcttcccaatatgcacaggtatatagcacaataggatggcatccaactgaagctggttcttatgatgataatattgagtcaatgattatcagtcatttagaaaatcccaaggttattgcacttggtgaaattggtctggattattattggatggaggatcccaaagatattcagatcgaggtgtttaagcgtcaaattgaactttcaaaagagtataaccttccttttgtcgttcatacacgtgatgcgttagaagacacttatgaagtcattaaggaatctggagttgggccttttggtggtataatgcactctttttctggttctttggaaatggctcagaaatttattgatttagggatgatgatttccttttctggtgttgtgacctttaagaaggcattagatgtacaagaagctgcacgagagttgccattagataagatattagtggaaacagatgctccttatttggctcctgtacctaaaagaggtcgagaaaacaaaaccgcttatacgagatatgtcgttgaaaaaatagcagagctacgaggcataactgtggaagaggtagcggaggctacataccaaaatgcagtaaggatatttagacttgatgaaaaaaat

SEQ ID NO: 10140 - protein, 260 aa, Streptococcus agalactiae
MIKIFDTHTHLNVENFEGKIDEEINLASELGVTKMNVVGFDQDTISKSLELSSQYAQVYSTIGWHPTEAGSYDDNIESMIISHLENPKVIALGEIGLDYYWMEDPKDIQIEVFKRQIELSKEYNLPFVVHTRDALEDTYEVIKESGVGPFGGIMHSFSGSLEMAQKFIDLGMMISFSGVVTFKKALDVQEAARELPLDKILVETDAPYLAPVPKRGRENKTAYTRYVVEKIAELRGITVEEVAEATYQNAVRIFRLDEKN

SEQ ID NO: 10141 - DNA, 390 bp, Streptococcus agalactiae
atgaagtcaataaaattacttagttttattgtaataatccttttagggcttggtttcactgtaggaggtttaaaagtgactgaaaacaataaacaacaagaattatgggaaatagctaatagcaaagacgctaaaaatgcttatcaaaagtggatttatgcagaagatgaagatgctttcaaagagaatgctgttattaagtcgtatgatattgacaaagaaagtatcaaaaaaaatcctatgggagggatttcggtaaggttaatcattaataaagatcctaacttatatattacttgtaatttggatagggataatcaagggcatttggtcagtcaaagtagccatcaatctccccagttaactcatttattggaaagtagaggtcat

SEQ ID NO: 10142 - protein, 130 aa, Streptococcus agalactiae; identical to SEQ ID NO: 8910

SEQ ID NO: 10143 - DNA, 1533 bp, Streptococcus agalactiae
atgatacatgatatgattaaaacaattgagcattttgctgagacacaagctgattttccagtgtatgatattttaggggaagtccatacttatggacaacttaaagtagactctgactctctagctgctcatattgatagcctaggccttgttgaaaaatcacctgtcttagtattcggtggtcaagaatatgaaatgttggcgacatttgttgctttaacaaagtcagggcatgcttatataccggttgaccaacactctgctttggatagaatacaggctattatgacagttgctcaaccaagccttatcatttcaattggtgaatttcctcttgaagttgataatgtcccaatcctagacgtttctcaagtttcagctatttttgaagaaaagactccttatgaggtaacacattctgttaaaggtgatgataattactatattattttcacttcagggactactggtttaccaaaaggtgtgcaaatttcacatgacaatttattgagctttacaaattggatgatttctgatgatgagttttcagttcctgaaagaccgcaaatgttggctcaaccgccatattcatttgacttatcagttatgtattgggcaccaacactagctatgggaggcaccctgtttgccctaccaaagacagtagttaatgatttcaaaaaactattcgctaccattaatgaattgccaatacaggtttggacttcgacaccatcatttgctgatatggcgctactatctaacgatttcaattcagagaccttgccacagttaacacatttttattttgatggggaagagttaactgtcaagactgcacaaaaacttcgtcaacgttttccaaaagctcgtatcgttaatgcatatgggccaacagaagcaacagttgctctatccgcagtagcaattactgatgaaatgttagaaacatgcaaacgccttccaattggttacactaaagatgactcaccaacgtatgtgattgatgaagaaggtcataaattaccaaacggagagcaaggtgaaatcattattgctggaccagcagtatcaaaaggctatcttaacaatccagaaaagacagctgaggcatttttccaattcgaaggtctacctgcttaccataccggtgacttaggaagtatgaccgatgaaggtcttctgctttacggtgggcgtatggatttccaaattaaatttaacggctatcgtattgaattagaagatgtttctcaaaacttaaacaaatcgcagtatgtaaaatcagcagtagcagtgccacgttataacaaggatcataaagttcaaaacttattagcctatattgtcttaaaagaaggtgtaagagatgattttgaacgtgatttggatttgacaaaagcaattaaggaagacttaaaggacattatgatggattacatgatgccatctaaatttatctatcgagaggatttacctttgacaccaaatgggaaaattgatatcaaaggtcttatgagcgaggtaaacaag

SEQ ID NO: 10144 - protein, 511 aa, Streptococcus agalactiae [sequence omitted]

SEQ ID NO: 10145 - DNA, 2376 bp, Streptococcus agalactiae
atgtcagaatttgatacaaaatcatatttagaaaaacttgatgcatggtggagagcagctaattatatttctgcagcacaaatgtatctaaaggataaccctctcttgagacgagagctggttgaaaacgacttaaaggttcatccaattggtcactggggcactgtacctggacaaaattttatctatgctcacttaaatcgcgctattaataaatacgatttagacatgttctatattgaaggtccaggtcatggtggtcaagttatggtatctaattcatatttagatggttcatatactgaattaaacccaaatattgagcaaacagaggatggctttaagcagttatgtaaaatcttctctttcccatgtggaattgcatcccatgctgcaccagaaacaccagggtcaattcatgaaggcggtgaacttggttacgcactttctcatgcgacaggtgccatcctagacaatccagatgttattgctgcgactgttattggtgatggtgaaggtgaaacaggaccacttatggctggttggctatctaatacctttatcaatccagtaaatgatggtgctgttctaccaatcttctatttaaatggtggtaaaatccataacccaactatctttgaacgtaagacagatgaagaattatctcagttttttgaaggattaggttggaaacctatttttgcagatgttgttgaactctctgaggatcatgcggctgctcatgctttgtttgcagaaaaattagatcaagctattcaagagattaaaaccattcaatcagaagcacgacaaaaaccagcagaagaagctatccaagcaaaattccctgtcttagttgcacgtattcctaagggttggactggtccaaaagcttgggaaggaacaccaattgaaggtggcttccgcgctcaccaagtaccaattccagtagatgcccaccatatggaacatgttgattctcttttgtcatggcttcaatcataccgtccagaagaattatttgatgaaaatggtaaaatcgttgatgagattgctgctatttcaccaaaaggtgatcgtcgcatgtccatgaatccaataaccaatgctggtattgttaaagcaatggatacagcagattggaagaaatttgctcttgatattaatgttccaggtcaaattatggcacaagatatgattgaatttggaaaatatgcagcagatttggtagatgctaatccagataatttccgtatttttggtccagatgaaacgaaatcaaatcgtcttcaagaagtgtttacacgtactagccgtcaatggcttggtcgtcgtaaaccagattatgacgaagctttaagtccagctggacgtgttattgattcccaattgtctgaacaccaagcagaaggtttcttagaaggttatgttttaactggtcgtcacggcttctttgcttcatacgaatcattccttcgcgttgtagattcaatggtaacacaacatttcaaatggttacgtaaatcaaaaacacacacaacatggcgtaaaaattatccagcgcttaacctaattgcagcttcaactgttttccaacaagatcataatggttatactcaccaagatccaggtattttaactcatttagctgaaaaaacacctgaatacattcgtgaatatttaccagcagatactaactcacttctagctgttatggataaagcgtttaaagctgaagataaaattaatttaattgtgacatctaagcaccctcgtccacaattttactctattgctgaagcagaagagttagtggcagaaggatataaggtgattgactgggcttcaaatgtgtcgcttaatcaagagccagatgttgtctttgctgcggcgggaacagaacctaacttagaagctttggcagctattagcattcttcataaggctttcccagaacttaagattagatttgttaatgtattagacatcctaaaacttcgtcatccttcacaagatgctcgcggtttatcagatgaagagtttaacaaagtctttaccacagataaacctgttatttttgctttccatggttatgaagatatgattcgagatattttctttagtcgtcacaatcataatttgcatacgcatggttaccgtgaaaatggtgacatcacaacaccatttgatatgcgcgtgatgtcagaattggaccgattccatctggcacaggatgcagctcttgcttctttaggaaataaagcacaagccttcagtgatgaaatgaatcaaatggttgcttatcacaaagactatattcgtgaacacggagacgatattccagaagtacaaaattggaaatgggaaaatatcaag

SEQ ID NO: 10146 - protein, 792 aa, Streptococcus agalactiae
MSEFDTKSYLEKLDAWWRAANYISAAQMYLKDNPLLRRELVENDLKVHPIGHWGTVPGQNFIYAHLNRAINKYDLDMFYIEGPGHGGQVMVSNSYLDGSYTELNPNIEQTEDGFKQLCKIFSFPCGIASHAAPETPGSIHEGGELGYALSHATGAILDNPDVIAATVIGDGEGETGPLMAGWLSNTFINPVNDGAVLPIFYLNGGKIHNPTIFERKTDEELSQFFEGLGWKPIFADVVELSEDHAAAHALFAEKLDQAIQEIKTIQSEARQKPAEEAIQAKFPVLVARIPKGWTGPKAWEGTPIEGGFRAHQVPIPVDAHHMEHVDSLLSWLQSYRPEELFDENGKIVDEIAAISPKGDRRMSMNPITNAGIVKAMDTADWKKFALDINVPGQIMAQDMIEFGKYAADLVDANPDNFRIFGPDETKSNRLQEVFTRTSRQWLGRRKPDYDEALSPAGRVIDSQLSEHQAEGFLEGYVLTGRHGFFASYESFLRVVDSMVTQHFKWLRKSKTHTTWRKNYPALNLIAASTVFQQDHNGYTHQDPGILTHLAEKTPEYIREYLPADTNSLLAVMDKAFKAEDKINLIVTSKHPRPQFYSIAEAEELVAEGYKVIDWASNVSLNQEPDVVFAAAGTEPNLEALAAISILHKAFPELKIRFVNVLDILKLRHPSQDARGLSDEEFNKVFTTDKPVIFAFHGYEDMIRDIFFSRHNHNLHTHGYRENGDITTPFDMRVMSELDRFHLAQDAALASLGNKAQAFSDEMNQMVAYHKDYIREHGDDIPEVQNWKWENIK

SEQ ID NO: 10147 - DNA, 1515 bp, Streptococcus agalactiae
atgacttattaccttagtattgactacggcggtacaaataccaaggcgcttatttttgacaaattaggacaccaaatcgctgtttcgagttttgaaactttaaaaaatgagactcaatctggtcatcgtcaagtaaaccttgttaaaacgtggaatgctataacttctgctattagagaggttattcaaatctcaaaactcagccctgagcagattagtgcagtagcatgtattggacatgggaaaggtctttatctgctagataataagttggagccacttgaacaaggaattttgtctacagataatcgtgccaaagatttggcgcaatatttcgaatctaaacttgataatatttgggagttgactcggcaacatattttcccttcacaaagtccagttattttacgttggcttaaagattatcagcccgaaacctataaatcaataggggcggtcctttctgcaaaggactttattcggtataagcttacaggaaaagtacagcaagaatatggtgacgcttcaggtaatcattggataaatttccaaacaggaacttatgatccagctattttagatttttttggcattagagagatagaaaactcacttcctgaacttatagatagtgcagatttagttcctgggggaattagttctcaagcagcaaaagagactggtcttgtagaagggacccccgttgttggagggctctttgacatcgatgcttgtgctcttggatcaggtgttttagagtcagatacttttagtgttatttcgggaacttggaatattaatacatatccaagtttaaaaccagcaaagcaagatagtggtcttatgacttcctattttccagatcgtcgttatctcttagaggcaagtagccctacttctgcagggaatcttaattttatgttaaaaatgctcatgcatcaagaaattgataacgctaaatctagtggaggttctatctatgataatttagaagaatttctcactcatactgatgctacacatcatggacttattttctttccgtttctttacggtagtaacacatcacaagatgctagcgcttgcttttttgggctaacaactaaatcgacgaaatctcagatgatacgtgcggtatatgaaggtattgcgtttgcacataagcagcatatcactgatttaataaaaagtaggggcagtgtgccaaaaataattcgtttctctggcggagctaccaactcaccagcatggatgcaaatgttttctgatatcttaaactttcctattgaaacagtagaaggcacagaattaggagggttaggaggagctattttagcacgtcatgctttagataagatttcgttaaaggaagcagtccaagatatggttcgtgtaaaagctatttataaacctcaattatccgaagtaaaggggtacaaaaaaaaatatcacgcttaccaaaaattattagaaacactggatcctatttggtcggaactcggtcatctgaataag

SEQ ID NO: 10148 - protein, 505 aa, Streptococcus agalactiae
MTYYLSIDYGGTNTKALIFDKLGHQIAVSSFETLKNETQSGHRQVNLVKTWNAITSAIREVIQISKLSPEQISAVACIGHGKGLYLLDNKLEPLEQGILSTDNRAKDLAQYFESKLDNIWELTRQHIFPSQSPVILRWLKDYQPETYKSIGAVLSAKDFIRYKLTGKVQQEYGDASGNHWINFQTGTYDPAILDFFGIREIENSLPELIDSADLVPGGISSQAAKETGLVEGTPVVGGLFDIDACALGSGVLESDTFSVISGTWNINTYPSLKPAKQDSGLMTSYFPDRRYLLEASSPTSAGNLNFMLKMLMHQEIDNAKSSGGSIYDNLEEFLTHTDATHHGLIFFPFLYGSNTSQDASACFFGLTTKSTKSQMIRAVYEGIAFAHKQHITDLIKSRGSVPKIIRFSGGATNSPAWMQMFSDILNFPIETVEGTELGGLGGAILARHALDKISLKEAVQDMVRVKAIYKPQLSEVKGYKKKYHAYQKLLETLDPIWSELGHLNK

SEQ ID NO: 10149 - DNA, 645 bp, Streptococcus agalactiae
atgaaatactttttagatactgccgatgtttctgaaattcgtcgtcttaatcgtttaggaatcgttgatggtgttactaccaatccgactattatttcacgtgaggggcgtgactttaaagaagttattaacgaaatttgccaaatcgttgatggcccagttagtgcagaagtgacaggtttaacttgtgatgaaatggttaccgaagctagagaaatcgctaagtggtcaccaaatgttgttgttaaaattccaatgactgaagaaggtttagcagcagtttcacaattatcaaaagaaggtataaagacaaatgtgacattaatatttactgtggctcaaggtctttcggcaatgaaagctggtgcaacatttattagtccttttgtgggtcgtcttgaagatattggaacagatgcttatgctttgattcgtgaccttcgtcacattattgatttttatggtttccaatctgagattattgctgctagcattcgtggattggcgcatgtggagggcgtcgctaaatgcggtgcgcacattgccactattccagataaaacatttgcatcactatttactcacccgcttactgataaagggattgaaactttcttaaaagattgggatagtttcaagaagaag

SEQ ID NO: 10150 - protein, 215 aa, Streptococcus agalactiae
MKYFLDTADVSEIRRLNRLGIVDGVTTNPTIISREGRDFKEVINEICQIVDGPVSAEVTGLTCDEMVTEAREIAKWSPNVVVKIPMTEEGLAAVSQLSKEGIKTNVTLIFTVAQGLSAMKAGATFISPFVGRLEDIGTDAYALIRDLRHIIDFYGFQSEIIAASIRGLAHVEGVAKCGAHIATIPDKTFASLFTHPLTDKGIETFLKDWDSFKKK

SEQ ID NO: 10151 - DNA, 657 bp, Streptococcus agalactiae
ttggttgaaactagaccaaatgtcattgtctccagctccaaaacagctctattagagcatgatggtattagtggtgcagttgtgcaatcgaatagacaccgtggactaattgagaagccttatcatatcactttaattgagccaagcgatgaagaaatttatcgcttttctgctcttttgaaccgtgaaaagttttggttggaaaatgaacaggaaccaactattaggctttggtgttataaggttgatagctttgagattggaaaagacgaatttggtgcctgggtggtcgatgttaccttcatctgccaccctaccaagtttttcaagaccactgacatccagacattgactggtaatggggttttgagggttcaagggtcagctcttgcttttccgaagattacagtggttggtcagagcgcttctgagacatcgtttacgataggtaaccaagtgattaagcttgaaaagctctcagaatcgctcgtgatgaccaatgatcctgacaatcctagctttaagacggctagtggaaaactcattaagtgggctggtgattttatcacagttgatactgctaaggggcagaatgtcggtgttgttttaggtgctggcataacatctttgaaatttgaaacagtttgggggtgggca

SEQ ID NO: 10152 - protein, 219 aa, Streptococcus agalactiae
MVETRPNVIVSSSKTALLEHDGISGAVVQSNRHRGLIEKPYHITLIEPSDEEIYRFSALLNREKFWLENEQEPTIRLWCYKVDSFEIGKDEFGAWVVDVTFICHPTKFFKTTDIQTLTGNGVLRVQGSALAFPKITVVGQSASETSFTIGNQVIKLEKLSESLVMTNDPDNPSFKTASGKLIKWAGDFITVDTAKGQNVGVVLGAGITSLKFETVWGWA

SEQ ID NO: 10153 - DNA, 342 bp, Streptococcus agalactiae
atgggcggtggtagcgtgaagatgacaccgctaaaggtggatatcaagaatcaagttttagagaacattaagaaggctgcccaaagtacagaaaatgacattagaactggaagccctagacgaaacggtgtttacgaaaaaggttggacacacgacatcatagatgacgccgctgttgttcataataatggcaaagaaaaatctctatcccacctattagagaatggtcatgccactaaaaacggtggctttgttgcccctagagagcatatcagaccagcctacctcaagaataaggagaaattccttaatgatatgaaatccattaaaatcacacctaaa

SEQ ID NO: 10154 - protein, 114 aa, Streptococcus agalactiae
MGGGSVKMTPLKVDIKNQVLENIKKAAQSTENDIRTGSPRRNGVYEKGWTHDIIDDAAVVHNNGKEKSLSHLLENGHATKNGGFVAPREHIRPAYLKNKEKFLNDMKSIKITPK

SEQ ID NO: 10155 - DNA, 1260 bp, Streptococcus agalactiae
atgaaaaaatcactcattgagcttttggaagctcgtcaaaaagcaactgatgaactggctgaggtaaagcttaaaaaagccactattgaagcaaagatgaaatcttcaaccattgaagacgatgacttggaacagttaaaaactgatgcagaaagtttggtttctcaagcaacagctattaaggaaacaattgctgggctggattctgacattgaagaaactgaagaagaactcagcaaagctgctaaaatcattaaagaaaaacagaaaggtaatacacctatggattatttgaaaaccaaagccgctgctcttgactttgtccgtattctgatggacaacgaaggtagcgcaaacagtgcccgtaaagcgtgggaagctaaccttgttgaaaaaggagtgactaacctcactaagattcttccagaacctgttcttatcgctattcaagatgcctttactaactataatgggatcttgaaccacgtttcaaaagatccacgttatgcggtgcgtgttgctcttcaaactcaagtatctcaagctaaaggacacaaagctggtaagactaagaaagatgaagacttcacattcttggatttcactatcaactctgcgacagtttatatcaaatatgcctttgaatattctgacttgaagaaagatacaacaggcgcttacttcaactatgtgatgaaagaacttgctcaaggcttcatccgaactattgaacgtgctgttgtcattggtgatggaaaatctaacagtgctgaagacaaaatcactgaaatcaaatcaattgctgaagaaactgaagcgaatctctttgaaacacaagaaatcaatgttgctggtgtatttgacaatgctgttcttgaaacgctggttgctggtattgataagatggttccaaatactactccaattcttgtcacttcaaaagccattgctcgtaaattgaaattggtcaaagatgcagaaggtcgctacatcgatcctcaaccatttgctccaattgcaaccaacggaaatgttattgctggttttcaagtttacatctatgactggatggacggtgcaactaacccaatcattgcatttgctgaccaagcttataagatgattggtgatgaggctgccgctgaccgctttgatgattatgatgtaacagtcaaccgccgtcatattgagcttgctagtgttatgggtggtcgtttggctcagtacaaatcagcggttaagtttacaaacccagcaggt

SEQ ID NO: 10156 - protein, 420 aa, Streptococcus agalactiae
MKKSLIELLEARQKATDELAEVKLKKATIEAKMKSSTIEDDDLEQLKTDAESLVSQATAIKETIAGLDSDIEETEEELSKAAKIIKEKQKGNTPMDYLKTKAAALDFVRILMDNEGSANSARKAWEANLVEKGVTNLTKILPEPVLIAIQDAFTNYNGILNHVSKDPRYAVRVALQTQVSQAKGHKAGKTKKDEDFTFLDFTINSATVYIKYAFEYSDLKKDTTGAYFNYVMKELAQGFIRTIERAVVIGDGKSNSAEDKITEIKSIAEETEANLFETQEINVAGVFDNAVLETLVAGIDKMVPNTTPILVTSKAIARKLKLVKDAEGRYIDPQPFAPIATNGNVIAGFQVYIYDWMDGATNPIIAFADQAYKMIGDEAAADRFDDYDVTVNRRHIELASVMGGRLAQYKSAVKFTNPAG

SEQ ID NO: 10157 - DNA, 477 bp, Streptococcus agalactiae
ttgaaaatcaatgaagttttagaaaagctaggaataagtcgtgctacccttacaaggtatcgaaaaaagctgggcatatttgaagaaactaggtcaaatatcaccaaaagtcagttcaaagagttggaaaagcttgccaatcaacggcaaaagtacacaaggcaggaacgtgttgagctatctcgtaagactttcaagctgattccaaaagaaaaaatgcttgaaatcagtgataatgattcagttgggttgaaaaatctcaaaactcaatacaatcacaatcaaaaagtgattgaaaacttccagcttgaaatcaataaggtcatcaatgacggtgagctacctgataagtacctacttgatggaatggaaaagtatcaaaagcttaacatgcagatcatgtcaacgattgaaaagcaaagtccacagggtgacaggctcaaagaaatgattcaggagaagttagcacgttatggt

SEQ ID NO: 10158 - protein, 159 aa, Streptococcus agalactiae
MKINEVLEKLGISRATLTRYRKKLGIFEETRSNITKSQFKELEKLANQRQKYTRQERVELSRKTFKLIPKEKMLEISDNDSVGLKNLKTQYNHNQKVIENFQLEINKVINDGELPDKYLLDGMEKYQKLNMQIMSTIEKQSPQGDRLKEMIQEKLARYG

SEQ ID NO: 10159 - DNA, 345 bp, Streptococcus agalactiae
atgaagttaaggcttgaagaactaagaaacaaacttggcctcagtcgcagagatgtgcatgaagccactggcatttctatgaacacgctgctacattatgaaaaaggcggtacaccatctattggtcaggttgaaaatatcgctaaggcttacaatatcaacccagcctggttgcttggttggattgatgaaggccagcaaccacaaccacttgaaaccgttgttgaaaagattatctatgtggaaaaggaaggctgtagattaccgccatattggaacaatgataataatggcagaatcatcaagtggaaagaatcaagaagagcattccaaaggagaacaatt

SEQ ID NO: 10160 - protein, 115 aa, Streptococcus agalactiae
MKLRLEELRNKLGLSRRDVHEATGISMNTLLHYEKGGTPSIGQVENIAKAYNINPAWLLGWIDEGQQPQPLETVVEKIIYVEKEGCRLPPYWNNDNNGRIIKWKESRRAFQRRTI

SEQ ID NO: 10161 - DNA, 258 bp, Streptococcus agalactiae
atgaacgaatataagaaacccacctacatcgtcattcaagaggcaatggctgagcgtattagatttcttgaagatgaattatataacagagcatacaaagacattgaacggctagaagttgagaatgaccgtctgaaggttagatgccttgatttgcagttggaaaatgctgactatgtctgggatgacatgtgtcgctctgctattgctcgtgcaaaatcagaaaatcgaagaccacacagaagatggaggggaaga

SEQ ID NO: 10162 - protein, 86 aa, Streptococcus agalactiae
MNEYKKPTYIVIQEAMAERIRFLEDELYNRAYKDIERLEVENDRLKVRCLDLQLENADYVWDDMCRSAIARAKSENRRPHRRWRGR

SEQ ID NO: 10163 - DNA, 414 bp, Streptococcus agalactiae
atgatcaataatgttgtacttattggccgcttgacaagagatgttgagctacgttacacgccgtcaaacatcgcaaacgctacttttaacctagcagtcaatcgaaatttcaagaatgctgctggtgatcgtgaagctgatttcatcaactgtgtgatgtggcgacaacaagctgaaaacttggccaattggacgaaaaaaggaatgctgattggtattactggacgaatccagacaagaagctacgaaaatcagcaaggtcagcgtatctatgtgactgaggttgttgctgacagcttccagattcttgaaaagcgtgataattcaacgaaccaggcaagcatggatgaccaattgccaccatcatttggaaatagtcagcctatggatatttcagatgatgatctaccgttt

SEQ ID NO: 10164 - protein, 138 aa, Streptococcus agalactiae
MINNVVLIGRLTRDVELRYTPSNIANATFNLAVNRNFKNAAGDREADFINCVMWRQQAENLANWTKKGMLIGITGRIQTRSYENQQGQRIYVTEVVADSFQILEKRDNSTNQASMDDQLPPSFGNSQPMDISDDDLPF

SEQ ID NO: 10165 - DNA, 1311 bp, Streptococcus agalactiae
atgaaatttttagacctctttgctggcattggtggttttcgccttggaatggagcaagctgggcatgagtgcataggattctgtgaaataaataaatttgctagagctagctacaaagtaatacatgatactgaaggagaaattgaactacatgacatcacaagagtttcagatgagtttattcgaggaatcggaagtgtggacgttatctgtggcggatttccgtgccaggctttctcaattgctggaaatagacgaggttttgaagatacacgaggaactttgttctttgaaattgctaggttcgcatctattctcagacctaagtatctattccttgagaacgttaaaggactcctcaaccacgaagggggggctacattcgagaccatcatcagaaccttggatgaattggggtacaacgtggaatggcaaatctttaacagcaagaattttggagtcccccagaatagggaacgagtgtttattatcggacatcttagaggagaaggtaccagaccaatttttcctttcgaatcaagcatcacagaaaattatcctatccacaccagaaaaataggaaatgttaatccatctggtaatggaatgaatggggaagtgtatgattcggaaggtttatctccaactctaacaacaaataagggagaaggagttaaaatcgctgtaaatgttgtaggcagattacctgggaaatttgaaatgccaaatagagtctacgatccagatggcctagcaccgactatcagaactatgcaaggtggagggttagagccaaaaataattcagcgaggcagaggctataatcagggaggagaatatgaaatttctccaactgtcacatgcaacagttggcaagaaaacaatcttttaaagataaaagaagccactaaaaaaggctattcagaggcagaggctggcgattcagtaaacttatctcacccaaattctgagacaagacgtggacgagttggtaaaggtattgccaatactctcttgactggagaagaacaaggtgtggttgtttatgacttgtacaacagaagaaagaaagatattgttggcactttaacagctagcggtcataacggtaatactactacgggtacttttggtatctctaacggatttagaatcagaaagcttacacctcgtgagtgttggaggctacaaggcttccctgactgggcttttgacaaggcgagtcaggtcaatagcaacagtcaattatataaacaagctggtaatagcgtaacagtaaacgtcattgctgcaattgcaaggagattgcta

SEQ ID NO: 10166 - protein, 437 aa, Streptococcus agalactiae
MKFLDLFAGIGGFRLGMEQAGHECIGFCEINKFARASYKVIHDTEGEIELHDITRVSDEFIRGIGSVDVICGGFPCQAFSIAGNRRGFEDTRGTLFFEIARFASILRPKYLFLENVKGLLNHEGGATFETIIRTLDELGYNVEWQIFNSKNFGVPQNRERVFIIGHLRGEGTRPIFPFESSITENYPIHTRKIGNVNPSGNGMNGEVYDSEGLSPTLTTNKGEGVKIAVNVVGRLPGKFEMPNRVYDPDGLAPTIRTMQGGGLEPKIIQRGRGYNQGGEYEISPTVTCNSWQENNLLKIKEATKKGYSEAEAGDSVNLSHPNSETRRGRVGKGIANTLLTGEEQGVVVYDLYNRRKKDIVGTLTASGHNGNTTTGTFGISNGFRIRKLTPRECWRLQGFPDWAFDKASQVNSNSQLYKQAGNSVTVNVIAAIARRLL

SEQ ID NO: 10167 - DNA, 600 bp, Streptococcus agalactiae
atgaaaaaatttgaccactatttcagcaaccatattgctgtaaaaaacgaatctgatacagtcaccattgttgactattacaatccagaaaagggctatgagtataacttacgttacattttcgatagaaaaaattcatcccttgctatcacaggagactttggggaattagttgcacgaaatttctacaatatgggtgaatgggacacattctacaatcactatactggtcatctggggtattttcttgaaaagttactatgttcaagtaggccagttcattactatgatactgacaaggctaaaagagaaattctcaatgaattctttgatggtgctgattatgatgatttagattttgatgatgaattcctacttgatcaattatttgacaattttgacgaagataaaggatttacttatattcttccagaggcttttgaacgttttagcgaagatatggaagaatatgaggtctatgaatttctatcaagggctggccgatacgtcaatgatgtctttgaactttacttagacgcttataagagagcttatgagtatctaacaaaggaggttgatgatggcacaacgcagaatgtt

SEQ ID NO: 10168 - protein, 200 aa, Streptococcus agalactiae
MKKFDHYFSNHIAVKNESDTVTIVDYYNPEKGYEYNLRYIFDRKNSSLAITGDFGELVARNFYNMGEWDTFYNHYTGHLGYFLEKLLCSSRPVHYYDTDKAKREILNEFFDGADYDDLDFDDEFLLDQLFDNFDEDKGFTYILPEAFERFSEDMEEYEVYEFLSRAGRYVNDVFELYLDAYKRAYEYLTKEVDDGTTQNV

SEQ ID NO: 10169 - DNA, 282 bp, Streptococcus agalactiae
atgaatgatctaatgattcaaatgcttgaccagttcgaagctggtctaatggacagaacgatgaaagtaatgcacgttgtgacagacgaaaagtatagatttcctttagaactcaacaagtctcaatgcgctttaatgctcttaggtactaaagatactgggacatttgatgaacgctttaactgtcataaggattttccgaggattccaaatgctcgtgagaaataccctcgtgatgaagtcattgaatggtatcacaagaattggcaaagaactgttatc

SEQ ID NO: 10170 - protein, 94 aa, Streptococcus agalactiae
MNDLMIQMLDQFEAGLMDRTMKVMHVVTDEKYRFPLELNKSQCALMLLGTKDTGTFDERFNCHKDFPRIPNAREKYPRDEVIEWYHKNWQRTVI

SEQ ID NO: 10171 - DNA, 468 bp, Streptococcus agalactiae
atgaatttgaatcaaattcgtatcatagaggcatgccataaatttctaattggcatcacaaatttcgaagaagagttacaagatgacgttctcgtctatcgttacaaaggtaaccttgtcagctttgaaacctatcaagaatatgaacaacggtcatttgtagactataatctaaaatatggctatcttgatgacactagaacttacctagatgacagagctgatttgatagcagctttccctagcgaagagcacttgagagccttgcaaagagttaacgatgctgaacaagctcgtgtgcaaatctttaagctactatctcaggtcaatcttgactctctctccgaaaaaaattccaacatcaaaaaagataattttggatatgatttcttcaattttgcaactaaagaagaataccctgtttatcttttttcagatgatgaatcatttgagctagttgctatcagt

SEQ ID NO: 10172 - protein, 156 aa, Streptococcus agalactiae
MNLNQIRIIEACHKFLIGITNFEEELQDDVLVYRYKGNLVSFETYQEYEQRSFVDYNLKYGYLDDTRTYLDDRADLIAAFPSEEHLRALQRVNDAEQARVQIFKLLSQVNLDSLSEKNSNIKKDNFGYDFFNFATKEEYPVYLFSDDESFELVAIS

SEQ ID NO: 10173 - DNA, 1068 bp, Streptococcus agalactiae
atggcatcatatcgaaaaagagagaacgggctgtgggaataccgcatttcctacaaaaccatagatggaaaatataaacggaaagagaaaggtggttttaagaccaagaagcttgctcaggcggcagcaatcgaaattgaaaagaaattgacccaaaacatcttgacaaatgacgaagtaactctatatgactttgtcaagacctggtcagaagtctataagcgtccgtatgtaaaagataagacttgggaaacctattcaaaaaactttaagcacatcaagaactatttccaagagttgaaggtcaaagatattacaccgctttactaccaaaaaaagttgaatgagtttggcgagaaatatgcccaagaaactcttgagaaatttcactatcaaataaaaggggctatgaaagttgctgtaagggaacaggttgttacctttaattttgcagaaggtgcaaaagtgaaatctcaggtagagcccaaaaatgaagaggaagattttttagaggagcgcgaatataaggctctcttggcccttacaagagagaacatccaatatgtatcctatttcactctttaccttcttgcagtcacaggactgcgtttttctgaggctatggggctaacctggagcgatatagacttcaaaaatggcattttggatataaacaagagttttgattactcgaatactcaagattttgcagatctgaagaatgagtcatcaaaaagaaaagttccaattgattcaaatacaatagatattcttcgagaatataagaaaaatcattggcaagctaatatcaagaatagagtgtgctttggtgtatctaattcagcttgcaataaactgattaagaaaattgtgggtaggaaagtcagaaatcactcattacggcacacatacgcttcgtttttgattttgaacggggttgacattgtgacaatttctaagctccttggacatgaaagtccagatattactctgaaagtttatacacatcagatggaagcactggctgagagaaattttgagaaaatcaaaaatatttttttagtcgca

SEQ ID NO: 10174 - protein, 356 aa, Streptococcus agalactiae
MASYRKRENGLWEYRISYKTIDGKYKRKEKGGFKTKKLAQAAAIEIEKKLTQNILTNDEVTLYDFVKTWSEVYKRPYVKDKTWETYSKNFKHIKNYFQELKVKDITPLYYQKKLNEFGEKYAQETLEKFHYQIKGAMKVAVREQVVTFNFAEGAKVKSQVEPKNEEEDFLEEREYKALLALTRENIQYVSYFTLYLLAVTGLRFSEAMGLTWSDIDFKNGILDINKSFDYSNTQDFADLKNESSKRKVPIDSNTIDILREYKKNHWQANIKNRVCFGVSNSACNKLIKKIVGRKVRNHSLRHTYASFLILNGVDIVTISKLLGHESPDITLKVYTHQMEALAERNFEKIKNIFLVA

SEQ ID NO: 10175 - DNA, 234 bp, Streptococcus agalactiae
atgtctcaattatctttggaagaacaattgaatcgactaaaagataaatacctttcttctaaaaatcaagaattttcaaatgttcacttaagtaaagtaaagaagaaaaagaagaaattaataatacttgaaaaagaaagatgtcgctgtcgattggagagagaagatactaaaaaaatcgatgataaaattgagaaattgaagaaagaattgatagatgttatgaaggaggaa

SEQ ID NO: 10176 - protein, 78 aa, Streptococcus agalactiae
MSQLSLEEQLNRLKDKYLSSKNQEFSNVHLSKVKKKKKKLIILEKERCRCRLEREDTKKIDDKIEKLKKELIDVMKEE

SEQ ID NO: 10177 - DNA, 642 bp, Streptococcus agalactiae
atggatatagaaaactactgccaagactactgtttggagactatctttccaaaacattatttcaaggatttacaagtaatcaccctaactgccggccaatccgtctgtaaacagggagaacaattagaatacttgcactacatcgtcaagggacgttttaaaattgtacgtcgactctttaacggcaaagaacatattttagatattaaaacaaaaccaacactgattggtgatattgaacttttgactaatagacaaattgtatcatctgttattgccttagaggatcttacagtcattcaattatcacttaaaggacggaaagagaaactgttaacagacgcaactttcctcctaaaacttagtcaagagctagctcaggcttttcatgatcaaaacatcaaagcgtctactaatctagggtataccgtcaaagagttacttgcaagtcatattttagcaattgaagaacaaggttactttcaacttgagttaagtagtttagctgattcgtttggcgtcagttatcgtcatttattaagagttatccacgatatggtcaaagaaggccttatccaaaaagaaaaaccaaaatactttatcaaaaatcgtttcgcactagaatcattaaatattcagcca

SEQ ID NO: 10178 - protein, 214 aa, Streptococcus agalactiae
MDIENYCQDYCLETIFPKHYFKDLQVITLTAGQSVCKQGEQLEYLHYIVKGRFKIVRRLFNGKEHILDIKTKPTLIGDIELLTNRQIVSSVIALEDLTVIQLSLKGRKEKLLTDATFLLKLSQELAQAFHDQNIKASTNLGYTVKELLASHILAIEEQGYFQLELSSLADSFGVSYRHLLRVIHDMVKEGLIQKEKPKYFIKNRFALESLNIQP

SEQ ID NO: 10179 - DNA, 423 bp, Streptococcus agalactiae
atgggaaactttaaaaattcagcggttaaatctatggttgtcatgcgaaaagcatttagaacaatagacggaaaagtctcagaatcatttaaagaatttgaattaacaccaactcagtttgcagttttggatgttctctatgctaaaggcacaatgaaaattggagaattgattgaaaatatgcttgctacatcaggtaatatgactgttgttattaaaaatatggaaaaaaagggatgggtattacgccattcttgtccgaatgataagagagcctttttggtgagtttaacaactgaaggagaagaagtgataaaaaaagctctaccagagcatattaaacgtgtagaagatgctttttcagtcttaacagaaacagagcaagaagacttgattaaccttttaaaaaaatttaaaaccttg

SEQ ID NO: 10180 - protein, 141 aa, Streptococcus agalactiae
MGNFKNSAVKSMVVMRKAFRTIDGKVSESFKEFELTPTQFAVLDVLYAKGTMKIGELIENMLATSGNMTVVIKNMEKKGWVLRHSCPNDKRAFLVSLTTEGEEVIKKALPEHIKRVEDAFSVLTETEQEDLINLLKKFKTL

SEQ ID NO: 10181 - DNA, 1836 bp, Streptococcus agalactiae
atgcttattccaacacttcgcgaaatgccaagtgatgctcaggttatcagccatgctcttatggttcgtgcaggatatgtccgccaagtttcggctggaatctatgcttatttgcctctagctaaccgtactattgaaaaatttaaaacaattatgcgtcaagaatttgagaagattggtgcagttgaaatgttagctccagctcttcttacagcagatttatggcgtgaatctgggcgctacgaaacatatggtgaagacctttataaattaaagaatcgtgatcaatcggattttatcttaggaccaactcatgaagagactttcacaactcttgttcgtgatgcagtaaaatcttataagcaattaccactaaacctttatcaaattcagtctaaatatcgtgatgagaagcgtcctcgtaatggacttcttcgaacacgtgaatttatcatgaaagatggatacagcttccacaaagattatgaagaccttgatgtcacttacgaagattaccgtaaagcatatgaagccatcttcacacgtgctggacttgactttaaaggcattataggtgacggaggtgctatgggaggtaaagatagccaagaatttatggcagtaactcccaatcgtacagatttaaatcgttggttagtccttgataaaactattccttctattgatgatattccagaggatgttttagaagaaattaaggtagaactctcggcttggctagtttctggtgaggacactattgcatactctactgaatcaagctatgctgctaaccttgagatggcaacgaatgagtacaaaccatctactaaggctgctacctttgaagaagtaacaaaagtagaaactcctaactgcaaatcaattgatgaggtagctggatttttatcaattgatgaaaatcaaactatcaagacactattgtttattgctgatgaacagcccgtggttgctttactagttggtaacgatcaagtcaatgatgtgaagttaaaaaattatttagcggctgatttcttagagcctgcaagtgaagagcaagcaaaagagatttttggtgcaggttttggttctcttgggccagttaacctacctgactctgttaaaattattgctgatcgtaaagttcaagaccttgctaatgctgtgtctggtgctaaccaagatggttatcattttactggagttaatccagaacgtgatttcacagctgaatacgttgatattcgtgaagtaaaagaaggggagatttctccagacggtaaaggtactctgaaatttgctcgtggtattgaaattggacatatctttaaactaggtacccgttattcagatagtatgggagcgaacatccttgatgaaaatggccgctcaaatcctattgttatggggtgttatggtattggtgttagtcgtattctctcagctgtcattgaacaacatgcccgactttttgtgaataagacaccaaaaggagcttatcgctttgcttgggggattaatttcccagaagaattagccccatttgatgtacatttgattactgtcaatgtcaaagatcaagagtcacaagaccttactgagaaaattgaagctgatttgatgcttaaaggttatgaagtcctgacagacgatcgtaatgaacgtgttggttctaaattctcagacagtgacttaattggacttccaattcgagtaactgttgggaagaaagcttctgaaggtatcgttgaagtgaaaattaaagcaagtggtgatacgattgaggttcacgctgataacttaattgaaactttagagattctaacaaaaaaa

SEQ ID NO: 10182 - protein, 612 aa, Streptococcus agalactiae
MLIPTLREMPSDAQVISHALMVRAGYVRQVSAGIYAYLPLANRTIEKFKTIMRQEFEKIGAVEMLAPALLTADLWRESGRYETYGEDLYKLKNRDQSDFILGPTHEETFTTLVRDAVKSYKQLPLNLYQIQSKYRDEKRPRNGLLRTREFIMKDGYSFHKDYEDLDVTYEDYRKAYEAIFTRAGLDFKGIIGDGGAMGGKDSQEFMAVTPNRTDLNRWLVLDKTIPSIDDIPEDVLEEIKVELSAWLVSGEDTIAYSTESSYAANLEMATNEYKPSTKAATFEEVTKVETPNCKSIDEVAGFLSIDENQTIKTLLFIADEQPVVALLVGNDQVNDVKLKNYLAADFLEPASEEQAKEIFGAGFGSLGPVNLPDSVKIIADRKVQDLANAVSGANQDGYHFTGVNPERDFTAEYVDIREVKEGEISPDGKGTLKFARGIEIGHIFKLGTRYSDSMGANILDENGRSNPIVMGCYGIGVSRILSAVIEQHARLFVNKTPKGAYRFAWGINFPEELAPFDVHLITVNVKDQESQDLTEKIEADLMLKGYEVLTDDRNERVGSKFSDSDLIGLPIRVTVGKKASEGIVEVKIKASGDTIEVHADNLIETLEILTKK

SEQ ID NO: 10183 - DNA, 849 bp, Streptococcus agalactiae
atggattttaaggaactgtttccagaagttattactaaacaggaagttaaacagagtgaggattatatcatcgttgagcaagatggtcatgtcctccactttccaaaatcttcgctaactaagcgtgaactatacttattacaaatgacaccaagcctggaagatgcgagttcagtggattctcagaatccttggtaccgctatctagttgaaggtcgtggaaggttgccccaatctcattcggcagtccaatttatttttattgagcatcaatttaccttatcagaagaacttaaggatttcttgtcgcctttagtaataaacgtagaaacaattatgacaattaatcaaacccaaagtgtcatgattttaaatcaggataatttctttaatgctacggaattactaacagatattttaccaacgattgaaaatgactttaacacgcgtttaaggtgctattttggaaatagttggacgcatctacaagcagtggactggaaagaattatatgaagaagaatataaactttttacgctttttcttagtcacaaggccgaacaacattactgtcgatttccaaagatggctttatgggctttggcaaatcaatcgcccatgccttctattaaagcaaaatgtttacaacatatccttgatacgagtgatacttcggctataataaaagccctgtggcaagagcaaggaaatcttgctaaaacggctaaggcacttttcattcatcggaattcattgcaatataaattagataaatttacccaatcttcgggacttaatttaaaaatattagatgatttagcctatgcctatttgatttcgatggatacc

SEQ ID NO: 10184 - protein, 283 aa, Streptococcus agalactiae
MDFKELFPEVITKQEVKQSEDYIIVEQDGHVLHFPKSSLTKRELYLLQMTPSLEDASSVDSQNPWYRYLVEGRGRLPQSHSAVQFIFIEHQFTLSEELKDFLSPLVINVETIMTINQTQSVMILNQDNFFNATELLTDILPTIENDFNTRLRCYFGNSWTHLQAVDWKELYEEEYKLFTLFLSHKAEQHYCRFPKMALWALANQSPMPSIKAKCLQHILDTSDTSAIIKALWQEQGNLAKTAKALFIHRNSLQYKLDKFTQSSGLNLKILDDLAYAYLISMDT

SEQ ID NO: 10185 - DNA, 894 bp, Streptococcus agalactiae
atggctattacgatacaaaatcatgagttgcaagtgacattaaaagcgttaggtgcaacaatgacttctattacagatagtcaaggcgttgagtacctttggcaaggggacgccacttattggggtgggcaagctcctattttatttcctatatgcggaagtgttcgaaatgattgcgtcatttacagaccagctcaagctccacattttacgggtatcataccaaggcatggctttgtacgtcacaaaacattcgactatgattacatatcggattcttctgttcgttttacaattaaaagtagtaaagaaatgttgataaattatccttatcgttttagtttagaaataacttacaccttaagaaataaaagcattgccattacatatattgtcaaaaacttagaatcagaaaaaaatatgccatatgctatcggagctcacccaggctttaattgccctttgtttgaaaaggaagtatttagtgattactatctagagtttgaacagtttgaaacttgcacaattcctgagtcgtttccggatacaggcttgttagatttacaagctagacatccttttttagaaaatcaaaaacaattatctcttaatcatgctttatttgaaaaagatgctattactttagaccaactacgatctaagacggtttacttaaaatctagaaatcatgcaaaaggaatccaacttgactttgatgattttgagaatcttattctttggacaagtaacaatggtggtccttttttggctttggaaccctggagttctttgtcaacttctattgaagagtctgatattttagaagataaacaaaatatcgtacggcttaatccaaagcagtcgaaacagcattctattcggatcactatttta

SEQ ID NO: 10186 - protein, 298 aa, Streptococcus agalactiae
MAITIQNHELQVTLKALGATMTSITDSQGVEYLWQGDATYWGGQAPILFPICGSVRNDCVIYRPAQAPHFTGIIPRHGFVRHKTFDYDYISDSSVRFTIKSSKEMLINYPYRFSLEITYTLRNKSIAITYIVKNLESEKNMPYAIGAHPGFNCPLFEKEVFSDYYLEFEQFETCTIPESFPDTGLLDLQARHPFLENQKQLSLNHALFEKDAITLDQLRSKTVYLKSRNHAKGIQLDFDDFENLILWTSNNGGPFLALEPWSSLSTSIEESDILEDKQNIVRLNPKQSKQHSIRITIL

SEQ ID NO: 10187 - DNA, 930 bp, Streptococcus agalactiae
atgattttaacagtaactttgaacccttctattgatatttcgtactgcttagaaaactttaacatggatactgtaaatcgagttaccgacgtctccaaaacacctgggggtaaggggttaaatgtgactcgtgttctttctcaacttggcgataatgtagtggcaactggtctattagggggggattttggagatttcatccgaagtggcttagatgcattggaaatcagacaccaatttttaagtattggtggagaaacacgtcattgtattgcagttttacatgagggtcagcagactgaaattctagaaaaaggtccacatattactaaagatgaagcagacgcctttttgaatcatctaaaacttatctttgatgctgcaactatcataacagtatcaggaagtttaccaaagggactcccctcagattattatgctaggttaatctccctagcgaatcactttaataagaaagttgttttagactgttcaggagaagcattacgttcggttttaaaatctagtgctaagccgaccgtcattaaacctaaccttgaagaattaacacaattaattggaaaaccaattagctatagtttagacgaattaaaatctaccttacagcaagatctttttagaggaattgattgggttattgtttctttaggtgctaggggagcttttgctaaacatgggaatcactactatcaagtgacgattccaaaaatagaagttattaatccagttggttcaggggatgcaacggttgcaggaatcgcgtctgctttggaacatcaactagatgatacaaatttgcttaagagagctaatgtcttgggtatgcttaatgcacaagaaacattaacagggcatatcaatctgacctactatcaagaattaatcagtcaaatccaagtgaaagaggta

SEQ ID NO: 10188 - protein, 310 aa, Streptococcus agalactiae
MILTVTLNPSIDISYCLENFNMDTVNRVTDVSKTPGGKGLNVTRVLSQLGDNVVATGLLGGDFGDFIRSGLDALEIRHQFLSIGGETRHCIAVLHEGQQTEILEKGPHITKDEADAFLNHLKLIFDAATIITVSGSLPKGLPSDYYARLISLANHFNKKVVLDCSGEALRSVLKSSAKPTVIKPNLEELTQLIGKPISYSLDELKSTLQQDLFRGIDWVIVSLGARGAFAKHGNHYYQVTIPKIEVINPVGSGDATVAGIASALEHQLDDTNLLKRANVLGMLNAQETLTGHINLTYYQELISQIQVKEV

SEQ ID NO: 10189 - DNA, 513 bp, Streptococcus agalactiae
atgaaaattgcggtcggttgtgatcatattgtaacttatgacaaaattgcagttgtggattatttaaaaacaaaagggtatgaggttattgattgtggaacttatgataatatccgtactcactatcctatttatggtaagaaagtaggagaagctgtcgctagtggaaaagccgacttaggtgtatgtatttgtggaactggagttggtattaataatgctgttaataaagttccaggaattcgctcagctctggtacgtgatttgacatcagctatctatgccaaagaagaattaaatgctaacgttatcggatttggtgggaaaattactggtgggctgttaatgacagatatcatcgaggcgtttataagagctaaatataaaccaacaaaagaaaacaaagtattaattgaaaagatagccgaggttgagactcataatgcccatcaagaagagaatgactttttcacagagttcttagataaatggaatcgtggtgaatatcacgac

SEQ ID NO: 10190 - protein, 171 aa, Streptococcus agalactiae
MKIAVGCDHIVTYDKIAVVDYLKTKGYEVIDCGTYDNIRTHYPIYGKKVGEAVASGKADLGVCICGTGVGINNAVNKVPGIRSALVRDLTSAIYAKEELNANVIGFGGKITGGLLMTDIIEAFIRAKYKPTKENKVLIEKIAEVETHNAHQEENDFFTEFLDKWNRGEYHD

SEQ ID NO: 10191 - DNA, 2448 bp, Streptococcus agalactiae
atgacattaacctttgggaaaccttctataacgatacgccgtctaggagtgataactagtacatatatgatgctaggttttatcttattatgtggatttttgcatcctagtacaatttatagtgaggaaataaaatctgatataaactcttttatatcaatagatgatgaaaaaactactgttcccatatttgactctactttagataagcttactaattcaatagaggagaggcagttagaattagattctgatacatcggacagtttaatagtagatgatcaaaaagataaagatatggtaatagtcttaggtgattctgacagtcaagaaaaattgtcacctcctctaaaatcggaaatagcgacagaagaaaatcgtaaacaggcaaatttagcagaactaaatgcaactcaacctaataatagaactacctatattatacccgaaagcagtcattccattgcagaacaacagagattcctgatagaatcaaagggttattcggttgcattacttaatagcgatgaatttagaaagacagcgagagaggatagaggttttgaaagggataagttgaggtctttggatatcattcctaagggagatttatcgacaagtaatgtcataggtaatacggacattgctagtcagatatcgttgggctttaaaaagaatgcgatacaggaacaccatcttactaaaacattctctcaaaaggatggaaagttatcgtctgttatagaggggatgcttgctattggcaaagagaaagtagagaaggaaataaaatatagtggtaatttatggcaaaaattaaaagctaaggcacactgccttgtttgctgtgttgataatttgaattttgaagatataaaatcttattttcaatattattgtcatctaaaccatcagctcaaattacctaaaggtgctatactttctgctaaaacagaagtatataggggaggagattttgggagaaaaaataaagataatgtgtttggttaccgtatcccctcattattaaaaacggaaaaaggaactttacttgtgggagctgatgaaagaattgagcaagcttgtgattggggaaacataggaatggttattcgccgtagtgaggatgatggtgtcacttggggaaaaagagaaactattgtcaatctccgtaataaccctagagttccgctagttactagtggtgactatagtggctcacctattaatatggatatggcattagttcaagatactagctctaagacgaaacgtattttttcaatatatgatatgtttccagaaggaagaggcgttattagtattgctaacacacctgaaaaagaatatacccaaatcggaggacagtcttatcttaatttatataataatggaaagaaatcgaaggtttttactatccgtgacaaaggtattgtatataattttaaagggaaaaagactgattatcatgttataacagaaactactaaaagtgaccattcaaatctaggggatatttataagggaaaacagctacttggaaatatatattttacaaaacataaaacgtcaccatttcgtttagcaaaatcaagctatgtgtggatgtcatatagcgatgatgatggtaggacatggtcatcacctagagatataacagcaagtcttcgtcagaaaggcatgaaatttttaggaataggacctggaaaaggtatagttttaaaatgggggccacacgctggtcgtattattattcctgcctattctacgaattggaaatctcatctaagaggttcacaatcttcacgcctaatttattcagacgaccatggaaaaacgtggcatactggaaaagcagtcaatgataaccgtatactttctaatggtgaaaaaattcactccttaacaatggataataaaaaagaacaaaatacagaatccgtacccgttcaattgaaaaatggggacattaagttatttatgaggaatctaactggtaacctagaagtagccacaagtaaagacggcggggagacttggcaaaaccatgttaaacgatataaggaagttcatgatgcttacgtccaattatcagctattcgctttgagcatgacaaaaaagagtatattttattagtgaatgctaatgggccaggtaagaagcgtcaagatggatatgcacgtctagcgcaagttaatcgaaatggtagttttaagtggttatatcaccatcacattcaagatggttcgtttgcttacaactctgttcaacaacttaataatgataaatttggtgtcctttatgaacatagagaaaaacatcaaaatagttttactttaaattacaaagtttttaattggagttttcttagtcaaaatacagagaagcaaggcactttatgggagaaaatggcagcaaattggcatgttttgtttaaattttattta

SEQ ID NO: 10192 - protein, 816 aa, Streptococcus agalactiae
MTLTFGKPSITIRRLGVITSTYMMLGFILLCGFLHPSTIYSEEIKSDINSFISIDDEKTTVPIFDSTLDKLTNSIEERQLELDSDTSDSLIVDDQKDKDMVIVLGDSDSQEKLSPPLKSEIATEENRKQANLAELNATQPNNRTTYIIPESSHSIAEQQRFLIESKGYSVALLNSDEFRKTAREDRGFERDKLRSLDIIPKGDLSTSNVIGNTDIASQISLGFKKNAIQEHHLTKTFSQKDGKLSSVIEGMLAIGKEKVEKEIKYSGNLWQKLKAKAHCLVCCVDNLNFEDIKSYFQYYCHLNHQLKLPKGAILSAKTEVYRGGDFGRKNKDNVFGYRIPSLLKTEKGTLLVGADERIEQACDWGNIGMVIRRSEDDGVTWGKRETIVNLRNNPRVPLVTSGDYSGSPINMDMALVQDTSSKTKRIFSIYDMFPEGRGVISIANTPEKEYTQIGGQSYLNLYNNGKKSKVFTIRDKGIVYNFKGKKTDYHVITETTKSDHSNLGDIYKGKQLLGNIYFTKHKTSPFRLAKSSYVWMSYSDDDGRTWSSPRDITASLRQKGMKFLGIGPGKGIVLKWGPHAGRIIIPAYSTNWKSHLRGSQSSRLIYSDDHGKTWHTGKAVNDNRILSNGEKIHSLTMDNKKEQNTESVPVQLKNGDIKLFMRNLTGNLEVATSKDGGETWQNHVKRYKEVHDAYVQLSAIRFEHDKKEYILLVNANGPGKKRQDGYARLAQVNRNGSFKWLYHHHIQDGSFAYNSVQQLNNDKFGVLYEHREKHQNSFTLNYKVFNWSFLSQNTEKQGTLWEKMAANWHVLFKFYL

SEQ ID NO: 10193 - DNA, 462 bp, Streptococcus agalactiae
gtgactcaagatattttatttattgatgcccattctcaggaagaattatttgacttagtatcaaaagcattgataaaacaacactatgttagtcctaactaccgacaggcagtaaaagaaagggagagagagtttccaacggggttaaaaattgatttaaaagatgggactcctattcaatatgttgctattccacacactgaaacgcagtattgtctagtagatagaatcttttatgtcaaaaatagtcagccaattactttcaaacatatgattaatccagaagaggagtgtagggttcaggattttttcttcatcattaatagtaggaatagtaaccaaagtgatattttatctaatttgattaccttctttattacaaaaggaaacctagatcggctacatgagcttggcgacaataaagaaaaaattaatcattatttaatagaaaaaggagtgttt

SEQ ID NO: 10194 - protein, 154 aa, Streptococcus agalactiae
MTQDILFIDAHSQEELFDLVSKALIKQHYVSPNYRQAVKEREREFPTGLKIDLKDGTPIQYVAIPHTETQYCLVDRIFYVKNSQPITFKHMINPEEECRVQDFFFIINSRNSNQSDILSNLITFFITKGNLDRLHELGDNKEKINHYLIEKGVF

SEQ ID NO: 10195 - DNA, 894 bp, Streptococcus agalactiae
atggtttctctaaaaggaaaaaatgatactaaacatcgcatgataactgctcaccttgatacacttggtgctatggttagggccatcaaaccagatggtcggttaaaaattgaccttattggtggatatacatacaatgccattgaaggagaaaactgtactatacacctctcaaaaaatggtaaagaaatttctggaactgctcttattcatcaaactagtgtccatgtttacaaagacgctggaactgctgaacgtaatcaaacaaatatggaaattcgtttagatgagaaagtaacaactgctgacgaaacacgtgctttaggcatccaggtcggtgatttcatttcatttgatccgcgtacaatcataacagacagcggctttattaaatcacgttacctagatgacaaggtatccgctggtatcctaatggaacttctttctgtttacaagaaagaagacattcaacttccttatactactcatttctactttagtgcctttgaagagctaggacatggagcaaattcaagcatcccaaatgaaactgtagaatatctagcagttgatatgggagctatgggagacgatcaagaaactgacgaatatactgtctctatctgtgttaaagatgcttctggtccttatcattatgaattacgtcaacatcttgtttctctagctgaaaacaataatattccttataaacttgatatttatccttattatggtagtgacgcctccgctgccatgcgtgctggtgcggaagttaaacacgcgctacttggtgcaggtattgaatctagtcattcttatgaacgtacccatatcgattctattcaagcaactgaactcttagtggatgcctatctcaaaagcaatatggtggac

SEQ ID NO: 10196 - protein, 298 aa, Streptococcus agalactiae
MVSLKGKNDTKHRMITAHLDTLGAMVRAIKPDGRLKIDLIGGYTYNAIEGENCTIHLSKNGKEISGTALIHQTSVHVYKDAGTAERNQTNMEIRLDEKVTTADETRALGIQVGDFISFDPRTIITDSGFIKSRYLDDKVSAGILMELLSVYKKEDIQLPYTTHFYFSAFEELGHGANSSIPNETVEYLAVDMGAMGDDQETDEYTVSICVKDASGPYHYELRQHLVSLAENNNIPYKLDIYPYYGSDASAAMRAGAEVKHALLGAGIESSHSYERTHIDSIQATELLVDAYLKSNMVD

SEQ ID NO: 10197 - DNA, 1647 bp, Streptococcus agalactiae
atgagaggatatagaatggaagaacgctttaagaaacgactacaagatgatatctctaaacatttttcccgccagtctttaattttatccttgttattgattgcacttttcgtccttttttctttagcgcctcaacagataggtctttataaagatgttaattcagtttcctatagttataagcaattgattcaaaaacatgataccttattagatgacttaggtaaaaatagtttgaaaccatttgtctcaggacacttaggaagtgctgatttgagtaagcaatattatcatttaaggaatcatttacaaagtcaaacagaacttttagtattctcacctaatcaagaacttttgtttgctagtaattcacatttaggtaatttttttagtaagtctatttacattagtgaagttttagataaggctaaaataaatcaaaggctactaaaaattattgtggatagtgagggagggcattaccttgcactcattaagccaattatagttaataaaaaagtttcaggttatgcctttttattgatgaatgggaaagactttttacttccaacgaaggctattaactcagacttgattattgccgatcagctaaataatagctttacttttactaatcgtgattttatctcctctagtttagataaggtagatagtcaattcttaactagatattttagttttcacgatcatcgagcttttgttgttaggaaagtagctctgcaagacaatatcctactttacatgtatcgtcccctgataccagtaactctggtcgtccttttttctctagtatcatcagttattatttttgtgattttacgacaaaaatctagagttctagccgatcgcatcgcagtaaaaaattctagcgccataaatcaaatggtgctagatatggatgccatttcccgccaagaaaaatctagtattgagcttgatagtcaagatgaatttcaatatctatctgtgcaaatcaatcagatggtttcacggttaaaagatttacatgagaaaactcttgatttggaaacacaaaagttgttgtttgaaaagaggatgttagaagctcagtttaatcctcacttcctttataatacccttgagacaattttaataaccagtcactatgattcacaattaacagaaagaatcgttatacaactaacaaaattattgcgctatagccttagtggtagcacagaagcagctgtgcttaaggatgatttagcaatcattgaatcctaccttttgattaatcaagtgagatttgaagaattaacttacactatttcagtatctcctgaacttgaacacatgcgtgtaccaaaacttttcttgttaccgctaattgagaatgctattaaatatggcttaaaagaacgtcatgatgtagcaataaacatagatatttggcaagatagtgatggaatttggtttactgtttcaaataatggatcaggtattagtttggctaggcaacaagccatacgtacaatgttaagatcaactcactcgcatcatgggcttattaattcttatagacgattacaatatcaattttcaacagtattgttagagtttacgaagacagatgatgcttttcgagttagctatatagtaaaggag

SEQ ID NO: 10198 - protein, 549 aa, Streptococcus agalactiae
MRGYRMEERFKKRLQDDISKHFSRQSLILSLLLIALFVLFSLAPQQIGLYKDVNSVSYSYKQLIQKHDTLLDDLGKNSLKPFVSGHLGSADLSKQYYHLRNHLQSQTELLVFSPNQELLFASNSHLGNFFSKSIYISEVLDKAKINQRLLKIIVDSEGGHYLALIKPIIVNKKVSGYAFLLMNGKDFLLPTKAINSDLIIADQLNNSFTFTNRDFISSSLDKVDSQFLTRYFSFHDHRAFVVRKVALQDNILLYMYRPLIPVTLVVLFSLVSSVIIFVILRQKSRVLADRIAVKNSSAINQMVLDMDAISRQEKSSIELDSQDEFQYLSVQINQMVSRLKDLHEKTLDLETQKLLFEKRMLEAQFNPHFLYNTLETILITSHYDSQLTERIVIQLTKLLRYSLSGSTEAAVLKDDLAIIESYLLINQVRFEELTYTISVSPELEHMRVPKLFLLPLIENAIKYGLKERHDVAINIDIWQDSDGIWFTVSNNGSGISLARQQAIRTMLRSTHSHHGLINSYRRLQYQFSTVLLEFTKTDDAFRVSYIVKE

SEQ ID NO: 10199 - DNA, 846 bp, Streptococcus agalactiae
atgttattacagctagataatatcactaaaagctacgggaaaaaaatagtacttaaccagatttcctaccagtttactcctggtttgtatggactcttaggagcaaatggtactggcaaaacaaccttattaaatttgatgagccactttacattagcagatagtgggaatatttattggaatggacaggagcagtcggaagaattttatcgtcacattggttttttaccgcaacattttcgctattatgatcaatttactggcattgctttcttaaattatatcgctaccttaaaaggtgttgataaaaagaaagctaaacaagaaattcctagattactagagcttgttggtttaggcgatgtaggtaaaaagaagatttcatcatactccggtggtatgaagcaacgtttaggcattgctcaagcacttatcaatgatcctgaaatactcattctggatgaaccaactgttggacttgatcccaaggaacgggttaaatttcgccatattttgagtcagttatccaccaataaaattatcattttatcaacgcatattgtgtcggatgtggaagctgttgccaaagaaattatagtattaaaaaatggtaaatttatcgaacatggcaacaccgcacagctgttgaaaactattgagggaaaagtgtgggaaataacgactgaaccaggtttatctcagatacccaatattgctattgttaatgaaaaagtcttttcagatagtcgggtatttcgtgtagtgagtgatatttgtccgagtgattcggcacagttggttgttccgactctagaagatttctacatctatcattttagaggggag

SEQ ID NO: 10200 - protein, 282 aa, Streptococcus agalactiae
MLLQLDNITKSYGKKIVLNQISYQFTPGLYGLLGANGTGKTTLLNLMSHFTLADSGNIYWNGQEQSEEFYRHIGFLPQHFRYYDQFTGIAFLNYIATLKGVDKKKAKQEIPRLLELVGLGDVGKKKISSYSGGMKQRLGIAQALINDPEILILDEPTVGLDPKERVKFRHILSQLSTNKIIILSTHIVSDVEAVAKEIIVLKNGKFIEHGNTAQLLKTIEGKVWEITTEPGLSQIPNIAIVNEKVFSDSRVFRVVSDICPSDSAQLVVPTLEDFYIYHFRGE

SEQ ID NO: 10201 - DNA, 2181 bp, Streptococcus agalactiae
atgaaaaataatgtcaaacagctctttagttttgaattttggcagaagtttgggaaggctttgatggttgttattgctgttatgccagcagcaggattgatggttagtattggtaactccattagtctattggatccatcaaatgttttattagggcgcatagctaatgttattgctcaaattggttggggagttattggtaacttacacatcttatttgcattggctattggtggtagctgggctaaagaacgtgccggtggtgcttttgcggctggcttatcctttattcttattaaccttattacagggaacttttttggtgttaaaacagatatgttagcagacagtaaagcaactgttcaaacggtatttggtgcaaccatcagagtttcagattactttgttaacgttcttgggcaacctgctcttaatatgggtgtatttgtcggtattatttcaggtttcgttggtgcaactgcctttaataaatattataactatcgtaaattaccagatgctttaacttttttcaatggaaaacgttttgttccatttgttgttatttatcgttcagtcattgttgcattaattttatcagtattttggccggttgttcaatcaggtatcaatggctttggtaaatggattgcaagttcacaagacagtgctccaatattagcaccatttgtctacggtacgttagagcgtttattgctcccatttggtttacaccatatgttaactattccaatgaactacacgcaactaggtggcacatacactgtccttacaggtgcaactaaaggagcacaggtgttgggacaagatccactgtggttagcatgggttggtgatttaattaacttaaaaggctcaaattcaagtcaataccatcacttattgacaagtgtcactccagcacgttttaaagtggggcaaatgattggtgcttcaggtattttgatgggattatcttatgctatgtatcgtaacgttgataaagataaaaaattgaaatacaagtcaatgtttatttcagcagcagcggctactttcttgacaggtgttactgagccaattgagtacatgttcatgtttgcagcaatgccactctaccttgtatatgctgtcgttcaaggatgtgcgtttgctatggcagatattgttaacctccgcgttcattcatttggtaatatagaatttttaacacgtgttcctatgggcataaaagcgggccttggtggtgatattttcaactttgtttgggtgacacttctttttgcagtattgatgtactttattgcaaactttatgattaaaaaattcaatttagcaacagcaggacgtaatggtaattatgataacgaagaggttgataatgctccttcaacagcttctggttctgctgatgcaaattctcaagttgtacaagttattaatttacttggtggtcgtgataacattgaagatgtagatgcatgtatgactcgtcttcgtgtcacagttaaagatggaaatagcgtgggttctgaagcagcttggaaaaaagctggtgcaatgggattggtgttaaaaggtaatggcgttcaagctatttacggacctaaagcagatgtccttaaatcagacattcaagatttgctagattcaggtacagttattccaatagttgatttagaaacaggtcaacctgtagcagcagccccagttacaacttataaaggaataacagaagaaattgtttcggtggctaatggtcaagtagaagcattggatgttgttaaagaccctgtcttttctcaaaaaatgatgggtgatggctttgctgtggaaccaactgatggcaatatttatgttccagtttcaggtacagttactagtgtctttccaacaaaacatgcttttggtttattaacagaaagtggcctagaagttttagtacatatcggtctagatacagtagctcttgatggtcaaccatttgaggttaaaatttctagtggtcaaaaagtggtagcaggcgatcttgctgtagtagcagatttggaagctatcaaagcagctggtaaagagacaagtgtgattatcgtctttacaaatgtttcagatataaaaactgttaaacttgaaaaatcaggtccacaaatagctaaaacagttgtggcaaaagtcgaactg

SEQ ID NO: 10202 - protein, 727 aa, Streptococcus agalactiae
MKNNVKQLFSFEFWQKFGKALMVVIAVMPAAGLMVSIGNSISLLDPSNVLLGRIANVIAQIGWGVIGNLHILFALAIGGSWAKERAGGAFAAGLSFILINLITGNFFGVKTDMLADSKATVQTVFGATIRVSDYFVNVLGQPALNMGVFVGIISGFVGATAFNKYYNYRKLPDALTFFNGKRFVPFVVIYRSVIVALILSVFWPVVQSGINGFGKWIASSQDSAPILAPFVYGTLERLLLPFGLHHMLTIPMNYTQLGGTYTVLTGATKGAQVLGQDPLWLAWVGDLINLKGSNSSQYHHLLTSVTPARFKVGQMIGASGILMGLSYAMYRNVDKDKKLKYKSMFISAAAATFLTGVTEPIEYMFMFAAMPLYLVYAVVQGCAFAMADIVNLRVHSFGNIEFLTRVPMGIKAGLGGDIFNFVWVTLLFAVLMYFIANFMIKKFNLATAGRNGNYDNEEVDNAPSTASGSADANSQVVQVINLLGGRDNIEDVDACMTRLRVTVKDGNSVGSEAAWKKAGAMGLVLKGNGVQAIYGPKADVLKSDIQDLLDSGTVIPIVDLETGQPVAAAPVTTYKGITEEIVSVANGQVEALDVVKDPVFSQKMMGDGFAVEPTDGNIYVPVSGTVTSVFPTKHAFGLLTESGLEVLVHIGLDTVALDGQPFEVKISSGQKVVAGDLAVVADLEAIKAAGKETSVIIVFTNVSDIKTVKLEKSGPQIAKTVVAKVEL

SEQ ID NO: 10203 - DNA, 522 bp, Streptococcus agalactiae
atgttgccgggagatgatggtttgactattttagagcgtttaaggagaaaacatcaaacggaaatgataccagtaatcatgacaactgctaaaggtagtgagtatgataaagttaaagggttagatcttggagcagatgattatctcgtcaaaccttttgggatgatggaaatgatttcacgaataaaagcagtcttgagacgtagccgccaagtagattcaaaagctcatattatcattggaaatttagagattgatccgactaattattgggtcaaaaggggaacggaaaaaatccacttaaccctaaaggaatttgagttattagtattattcttccgtaatcccaatagagtctttacaaggcaagaacttctggataaggtttggggagaacaatttttaggagaaactagaactgtggatgttcacattgggacactgcgaacaaaacttggtgaggatggctatttgattgctacagtaaggggagttggataccgtttggaggaaagacatgac

SEQ ID NO: 10204 - protein, 174 aa, Streptococcus agalactiae
MLPGDDGLTILERLRRKHQTEMIPVIMTTAKGSEYDKVKGLDLGADDYLVKPFGMMEMISRIKAVLRRSRQVDSKAHIIIGNLEIDPTNYWVKRGTEKIHLTLKEFELLVLFFRNPNRVFTRQELLDKVWGEQFLGETRTVDVHIGTLRTKLGEDGYLIATVRGVGYRLEERHD

SEQ ID NO: 10205 - DNA, 747 bp, Streptococcus agalactiae
gtgagtaaattagtaattaataatttagatttgtattatggagaatttcacgctctgaaggatgttaatttagacattgaagaaaaagaaatcacagcctttattggaccttctgggtgcggaaagtctactctcttgaaaagtattaaccgtatgaatgatttggtcaaaaattgcaaaatcacaggggatattactttagaaggcgaggatgtctatagacaattggatattaaccaattgcgtaaaaaggttggaatggtgtttcaaaaacctaatccgtttccaatgagcatttatgataatgttgcttttggtccaagaacgcacggtattcattccaaagcagagttagatgatatcgttgaacgttcccttaaacaggcggctctatgggatgaggttaaagatcgtcttcacaaatctgctctgggtatgtctggcggacagcagcaacgtttgtgtattgcgcgtgctcttgctattgagcctgatgttttacttatggatgaacccacaagtgccttggatcctatttcaacagcaaaaattgaagaattggttatccaactgaagaagaactacactattgttatagtgacacataatatgcaacaagctgttcgtatttctgataaaacagcattctttctgatgggagaagtggttgaatataacaaaacgagccaactcttttcattgccacaagatgagcgtacagaaaactacattacagggagattcgga

SEQ ID NO: 10206 - protein, 249 aa, Streptococcus agalactiae
MSKLVINNLDLYYGEFHALKDVNLDIEEKEITAFIGPSGCGKSTLLKSINRMNDLVKNCKITGDITLEGEDVYRQLDINQLRKKVGMVFQKPNPFPMSIYDNVAFGPRTHGIHSKAELDDIVERSLKQAALWDEVKDRLHKSALGMSGGQQQRLCIARALAIEPDVLLMDEPTSALDPISTAKIEELVIQLKKNYTIVIVTHNMQQAVRISDKTAFFLMGEVVEYNKTSQLFSLPQDERTENYITGRFG

SEQ ID NO: 10207 - DNA, 93 bp, Streptococcus agalactiae
ttgtttctgaatcaacaacatgggattccattccttggtaactttgaaaaagccagagatgaaaaaggctacaatggtcatcagacaagctat

SEQ ID NO: 10208 - protein, 31 aa, Streptococcus agalactiae
MFLNQQHGIPFLGNFEKARDEKGYNGHQTSY

SEQ ID NO: 10209 - DNA, 324 bp, Streptococcus agalactiae
atgcaacaggtttttaatgtgagtgttcctgtaccagatgatgttgttattatttcaaaagaagaatatttaaatttattaagtgataatgaacaaggcaagtggtgggatattgataacttgcaagagttattgggaattggaaggtcaaaattgattaatgatattttgttaaatccagatataaaaaaagaagtagatttatcaattaatccaaatggttttattgtttatccgaaaggtaaaggtagtcgatataaaatattagcaacaaaagctagaaaatattttgaagataattttggttctattttattaaatagt

SEQ ID NO: 10210 - protein, 108 aa, Streptococcus agalactiae
MQQVFNVSVPVPDDVVIISKEEYLNLLSDNEQGKWWDIDNLQELLGIGRSKLINDILLNPDIKKEVDLSINPNGFIVYPKGKGSRYKILATKARKYFEDNFGSILLNS

SEQ ID NO: 10211 - DNA, 264 bp, Streptococcus agalactiae
atggaggctattgtttattcacattttagaaataatttaaaagattatatgaagaaggtcaatgatgaatttgagcctttgattgtagttaataaaaatcctgatgaaaatatagtggttttatctcaagatagctgggaaagtttacaagaaacgattcgtttgatggaaaatgattatctatcacataaggttattaatggtatatcacaagttaaagagaagcaagtcactaaacatggtttaattgaggtagaagatgtt

SEQ ID NO: 10212 - protein, 88 aa, Streptococcus agalactiae
MEAIVYSHFRNNLKDYMKKVNDEFEPLIVVNKNPDENIVVLSQDSWESLQETIRLMENDYLSHKVINGISQVKEKQVTKHGLIEVEDV

SEQ ID NO: 10213 - DNA, 480 bp, Streptococcus agalactiae
atggatgttagtgcaattgttagagatataaaaactggtagagctacgttagtttgttttcctgtggaaatgagtgagcttaagttagctttggggcttcgtgaagaagatgatttagagtatattattgcagattcggattgtcagttactaaaagaacatgattctattgagatgattaatcaatttgttgaactggtagagaatgttgatagtgaacttgttaaagcagtgcatcaggtaataggttatactgcctcagactttgtggattatgattttaattttggtgattgttgtttactgtctgatgtcacaactagacgagaactaggtgaatattatttcgatgaattaggcgtacaaggagttggtaaagaggctctggagatgtattttgatcatgaagcttatggtcgagatattgacttagaaagccaaggtggtttttcagactacggatatgtcgaaatatcaggg

SEQ ID NO: 10214 - protein, 160 aa, Streptococcus agalactiae
MDVSAIVRDIKTGRATLVCFPVEMSELKLALGLREEDDLEYIIADSDCQLLKEHDSIEMINQFVELVENVDSELVKAVHQVIGYTASDFVDYDFNFGDCCLLSDVTTRRELGEYYFDELGVQGVGKEALEMYFDHEAYGRDIDLESQGGFSDYGYVEISG

SEQ ID NO: 10215 - DNA, 1347 bp, Streptococcus agalactiae
atgtttagtaaaatagaatttaaaaactttatgtccttttcaaatttgacttttgatttgctgaatagaggaaaatgtaaggatattattgcaatctatggagaaaacggttcaggaaaaacaaatattgttgaagcttttaagttactagttttgtcattacaatcaatggaatccttaaatgaaaatacacgattacaatcattattaaaagaacaaacaaataaagaagaaaatcaaaaaactaactttggtgatatatcagaaatcttagataaaatcagtttcttcaccacttttaagggcatagcgaaaaatactcatagaattgcatctgaaggtaatacgattctaaaatattattttaatatcgaaaaagataatggttattaccttctagaatataatgaaaataatgaactagtaaaagaggagctagtatttaagataaaatccaataagggagttcatttcagtattactaacatagatggtttatctcaatcattaaataagacaatttttaagaatactatttttaaagatttgactgaacaaatagaaaaatattggggtaaacatacattcctatcaatatttaataattattgtctagaagtaaatgaagagtttattaatgaacaagtttctataaattttcaaaaagtagttgatgaatttgataaaatttttatttggagtggtaattttagaggtccttttcattcgacagaattattattgaaagatatttcaaaaggtaaaattgataagtcggaaaaagaaaaactttcctatactgaggaaattatttataaatattttagtgcattatatattgatataaaagatgttaaatataagcaggatgctcaaggtcaagaaataaaatatgaactcatgatccgaaaaaatattggaggtgatcttttagatgtaccaataagtttagaatctcagggaacaaaaaatcttctggatcttctaaaagtttttaacaatgtgttggatgggaaaatatgtatcgttgatgaaattgactcaggtattcatgatcttttaatgaatagtattctgaatgacttgaaaggaagtgtgaatggtcagttaatatttacaacgcatgatacaacgttattgaaggaattatcaccgagctcagcttattttttaaatgtagatattaaaggtaataaagttatcatttctggcaatgaggcagataaaaaaataggagtaaataacaatttagaaaaattatatttgtctggtttctttggtgctgtaccagatccattagatattgatttttcagatttatttcttgatcataatttaagcgaggac

SEQ ID NO: 10216 - protein, 449 aa, Streptococcus agalactiae
MFSKIEFKNFMSFSNLTFDLLNRGKCKDIIAIYGENGSGKTNIVEAFKLLVLSLQSMESLNENTRLQSLLKEQTNKEENQKTNFGDISEILDKISFFTTFKGIAKNTHRIASEGNTILKYYFNIEKDNGYYLLEYNENNELVKEELVFKIKSNKGVHFSITNIDGLSQSLNKTIFKNTIFKDLTEQIEKYWGKHTFLSIFNNYCLEVNEEFINEQVSINFQKVVDEFDKIFIWSGNFRGPFHSTELLLKDISKGKIDKSEKEKLSYTEEIIYKYFSALYIDIKDVKYKQDAQGQEIKYELMIRKNIGGDLLDVPISLESQGTKNLLDLLKVFNNVLDGKICIVDEIDSGIHDLLMNSILNDLKGSVNGQLIFTTHDTTLLKELSPSSAYFLNVDIKGNKVIISGNEADKKIGVNNNLEKLYLSGFFGAVPDPLDIDFSDLFLDHNLSED

SEQ ID NO: 10217 - DNA, 1230 bp, Streptococcus agalactiae
gtggatgctatctatttaaaaaaatttcgaaagaaaacaggtctaaaacaaaaggaatttgctttaagttctggtttgacattgaaatcacttagaaactatgagcaaggaaagcggaagttgacacttgaaaagtatcaagagataaaatcacattttggatatctagtagaaaatgatagttcacgattacaagtgatgattgactatgtcagaattacgttaaaggatgttagggatcttgaatttttctgtcgtaactttttgcactgtgcatttaaagaatttcagccttttgaatcgaagttgatgaattacaatcatctttggaaacgtggagatatttggatatttgattttgcggataaacatgagacaggtaattttcaaataactgttcaattgtctggtcgtggatgccgacaattggaattgttgatggaaactgaaaaatttacatggcatgattggttaagttatctaagaaattcatatcgtgatgatatgaatgtgacacgttttgatattgctattgatgaattgtatctgggtaaggatagagaaaatgaacagtttcatttgtcagatatgatttcaaaatattatcgtcatgagttagattttgaaagtttgagaacttggaattatataggtggcggttctttaaatttttcggatatggaagagattgagcagaatagacaaggaatatcgctttattttggtagtcgtcaatcagaaatgtattttaacttttatgaaaaacgttatgaaattgcaaagcaggaaggaattactgttgaagaagctttagaaatttttgaattgtggaatcgttatgagatacggttatctcaaagtaaagctaatgcggcagttgatgaatttatttctggagtgccgattggtgaaatatccagagggttaattgttagtaagattgacgtgtatgatgggaaaaatgaatatgggtcgtttcaagcagatagaaagtggcaattaatgtttggaggtgttgagcctttaaaatttgttacaaagccagaggcttatagtattgaacgaaccttacgttggttaagtgattctgtttctccgtctttagctatgataagagagtatgacatgattgtggatggtgactatttacaaaccattcttaattctggggaagtcaatgaacgtggggagaagatacttgacagtatcaaagctagcttaggtattttg

SEQ ID NO: 10218 - protein, 410 aa, Streptococcus agalactiae
MDAIYLKKFRKKTGLKQKEFALSSGLTLKSLRNYEQGKRKLTLEKYQEIKSHFGYLVENDSSRLQVMIDYVRITLKDVRDLEFFCRNFLHCAFKEFQPFESKLMNYNHLWKRGDIWIFDFADKHETGNFQITVQLSGRGCRQLELLMETEKFTWHDWLSYLRNSYRDDMNVTRFDIAIDELYLGKDRENEQFHLSDMISKYYRHELDFESLRTWNYIGGGSLNFSDMEEIEQNRQGISLYFGSRQSEMYFNFYEKRYEIAKQEGITVEEALEIFELWNRYEIRLSQSKANAAVDEFISGVPIGEISRGLIVSKIDVYDGKNEYGSFQADRKWQLMFGGVEPLKFVTKPEAYSIERTLRWLSDSVSPSLAMIREYDMIVDGDYLQTILNSGEVNERGEKILDSIKASLGIL

SEQ ID NO: 10219 - DNA, 294 bp, Streptococcus agalactiae
atgaaacaagaaacattagtgttacttccaaattttattggagatgcaatttatgaaggatttgaagctggacctgctcaattaaatggtaaaaaagggtcttatacaagacacattttgtttaatgaaaaacatggtaagttttatgtttatacaccagcatcttcacgtgtgattggaaatggaaaaatggtaactgttgaaaaaccgttattgtttattgacaatacaattaatggtagaaatattgaacctgcaaaaaatgtatgggctgaaaagcttattgaagtgaaa

SEQ ID NO: 10220 - protein, 98 aa, Streptococcus agalactiae
MKQETLVLLPNFIGDAIYEGFEAGPAQLNGKKGSYTRHILFNEKHGKFYVYTPASSRVIGNGKMVTVEKPLLFIDNTINGRNIEPAKNVWAEKLIEVK

SEQ ID NO: 10221 - DNA, 1251 bp, Streptococcus agalactiae
atgtcagacttattatccctaccagacattaaaacaatagaaccgccacaagaaaatgaaaccgatatgatgtttaaagttgaagcagtcggaccacctgaacgttgtcctgaatgtggttttgacaagttgtacaaacacagttcaagaaatcaactaattatggatttgcccattcgtttaaagcgagtgggcttacatttgaaccgtagacgatacaagtgtcgtgaatgcggatctaccatatctgtagatgaaaagcgtagtatgaccaaaaggcttttaaagtccattcaagagcaatccatgtctaagacctttgtagaagtcgcagaaagcgttggtgttgacgagaaaaccattaggaacgtttttaaggactatgtggcactcaaagaacgtgaataccagtttgaaactcctaagtggcttgggatagacgagatacatattatccgtagacctcggcttgtattgactaatattgaacgcaggactatttatgacatcaagcctaaccgtaacaaggaaacagtcatccaacgtctttcagaaatcagtgacaggacttacattgagtacgtcacaatggatatgtggaagccctacaaagacgcagtgaacactatccttccacaagctaaagttgtcgtagataagtttcatgtagttagaatggctaatcaagccttagataacgtcagaaagtctttgaaagcccatatgagccaaaaagaaagacgtacccttatgcgtgaaaggtttatccttctaaagcgtaaacacgatctaaatgaacgtgaatcattcctcttagatacttggttaggtaatcttcctgctttaaaagaagcctatgaactcaaagaagagttttactggatatgggatactcctgatccagatgaaggtcatcttcgttatagtcaatggagacaccgttgtatgtccagcaactctaaagacgcatataaagacctcgtgagagccgtagacaactggcatgttgaaatattcaactactttgataaaaggctcactaatgcttatacggagtcaattaacagcattattaggcaggtagagcgaatgggtagaggttactcgtttgatgccttacgagccaaaatccttttcaatgagaagctccataaaaagcgtaagccacgatttaattcaagtgctttcaataaagctatgttatacgatactttcaattggtatgaagtgaatgatcacgacattacagac

SEQ ID NO: 10222 - protein, 417 aa, Streptococcus agalactiae
MSDLLSLPDIKTIEPPQENETDMMFKVEAVGPPERCPECGFDKLYKHSSRNQLIMDLPIRLKRVGLHLNRRRYKCRECGSTISVDEKRSMTKRLLKSIQEQSMSKTFVEVAESVGVDEKTIRNVFKDYVALKEREYQFETPKWLGIDEIHIIRRPRLVLTNIERRTIYDIKPNRNKETVIQRLSEISDRTYIEYVTMDMWKPYKDAVNTILPQAKVVVDKFHVVRMANQALDNVRKSLKAHMSQKERRTLMRERFILLKRKHDLNERESFLLDTWLGNLPALKEAYELKEEFYWIWDTPDPDEGHLRYSQWRHRCMSSNSKDAYKDLVRAVDNWHVEIFNYFDKRLTNAYTESINSIIRQVERMGRGYSFDALRAKILFNEKLHKKRKPRFNSSAFNKAMLYDTFNWYEVNDHDITD

SEQ ID NO: 10223 - DNA, 333 bp, Streptococcus agalactiae
atgaaaaggaataaacatttaccgttaacagaaactacctattatatcttattagctttgtttgaggaagcacatggctatgctattatgcaaaaagttgaagaaatgagtggcggtgatgttagaatagccgcagggacaatgtacggtgccattgaaaatttacttaaacaaaaatggataaagtctatcccaagtgacgatagaagaagaaaagtttatattattactgagacaggaaaagaaatagtagaacttgaaacgaatcgattaagaaagttacttaatactgctaatcagttgggttttgggggagatagttatgataaagtt

SEQ ID NO: 10224 - protein, 111 aa, Streptococcus agalactiae
MKRNKHLPLTETTYYILLALFEEAHGYAIMQKVEEMSGGDVRIAAGTMYGAIENLLKQKWIKSIPSDDRRRKVYIITETGKEIVELETNRLRKLLNTANQLGFGGDSYDKV

SEQ ID NO: 10225 - DNA, 486 bp, Streptococcus agalactiae
atggaaattaaagaatacgagaataatccgtaccatttagcacagctagtagatttaattaattattgtcagaatatagaagctaaacttgatataaagatggctgaacaagacgatatttttcaaatagaaaattattatcaaaacagaaaaggtcaattttggattgccttagaaaatgaaaaagtagttggttcgattgcgttactgcgtattgatgataaaacagctgttctaaaaaaattttttacatatccaaaatatagaggaaatcctgttcgacttggtcgaaaattatttgaaagatttatgctttttgctcgagctagtaaattcacaagaattgtcttggatactccagaaaaagagaaaagatctcacttcttttatgaaaatcaaggatttaagcaaataacaagagatgaactagatgtagactacatttttccagatagagattcaaggatatatgtaaaacttcttgat

SEQ ID NO: 10226 - protein, 162 aa, Streptococcus agalactiae
MEIKEYENNPYHLAQLVDLINYCQNIEAKLDIKMAEQDDIFQIENYYQNRKGQFWIALENEKVVGSIALLRIDDKTAVLKKFFTYPKYRGNPVRLGRKLFERFMLFARASKFTRIVLDTPEKEKRSHFFYENQGFKQITRDELDVDYIFPDRDSRIYVKLLD

SEQ ID NO: 10227 - DNA, 741 bp, Streptococcus agalactiae
atgttaaaaaaagaatggatggagaatgttaggacatacaaagttatatctattctgattacttgttcaatatttggtatattaggtcccttaactgcacttatgatgcctgatattatggcaggaattttacctaaaaaactacagggagcgataccagagcctacctatattgattcttatattcagtattttaaaaatatgaatcagcttggtttagttattttagtatttttatttagtagtacactgacgcaagaattttcaaaaggaaccttaattaatctagttacgaagggattagccaaaaaagttataatccttgctaaatttatagtaattacccttctatggacagtgtcatacttattaagtgttgtcatccattttagttatacgttatattactttagtaacgaaggaagtcataaattaatggtttacggtgcaacatggtttatcggtattcttttcataagcttaatactctttttttcagttctttttcgtaaaactttagggggtttgttaggttgtctttttatggtggtgttatgtgtagtatctggattttttaaaatcagtaaaagctataatcctatgcttcttatccaaaaacaaggagaaatattaagtggaaagtttaaagttcaagacttaatggaaccgagcatattagtgtttttgcttattataatgacgttattacttagcatgtacatttttgaaaaaagtgaagtt

SEQ ID NO: 10228 - protein, 247 aa, Streptococcus agalactiae
MLKKEWMENVRTYKVISILITCSIFGILGPLTALMMPDIMAGILPKKLQGAIPEPTYIDSYIQYFKNMNQLGLVILVFLFSSTLTQEFSKGTLINLVTKGLAKKVIILAKFIVITLLWTVSYLLSVVIHFSYTLYYFSNEGSHKLMVYGATWFIGILFISLILFFSVLFRKTLGGLLGCLFMVVLCVVSGFFKISKSYNPMLLIQKQGEILSGKFKVQDLMEPSILVFLLIIMTLLLSMYIFEKSEV

SEQ ID NO: 10229 - DNA, 813 bp, Streptococcus agalactiae
atgatttatggattcgtaggaccaaatggagcaggtaaaacaacgacaataaaaatgattttaggattgttaaaatttgatacgggtttcataacaatttttggtaaaaaagttaattttggaagaacagataccaatcaactgattggctatctcccagatgttcccgagtactacgattatatgacagctctagaatatcttgatttatgttctggtttagcgagatcaaagcataagctttctaacaaagaactacttaggtcagttggacttgacgataatcaccaaaagattgctacttattctcgaggaatgaaacagcgtcttggattagcccaagcactggttcatgatcctaaaattattatttgcgatgaaccaacctctgcattagacccgaaaggtcgccaagatattttagatattatttcaaatcttagaggagaaaaaactgtgattttttctacccatattctctctgatgtcgaaaaaatatgtgatcatgttctggtgttaactaagtgtgggatttattctcttgaagagttaaaaggaaaaaaatcagaggaaaattattcggttcgtattttaataaaagtgacaaagtctgaagctaaggtactatctcataactatcagatagaaaagaaagataatgagtatgcactgactctcaaaggctctaaaatggataacaaagcagatttactagctggtttttaccaagatttagtttctttaaagattagcccatcagctattgaagtcattgacaatagtttagaggagctttatttggaggttaccaaa

SEQ ID NO: 10230 - protein, 271 aa, Streptococcus agalactiae
MIYGFVGPNGAGKTTTIKMILGLLKFDTGFITIFGKKVNFGRTDTNQLIGYLPDVPEYYDYMTALEYLDLCSGLARSKHKLSNKELLRSVGLDDNHQKIATYSRGMKQRLGLAQALVHDPKIIICDEPTSALDPKGRQDILDIISNLRGEKTVIFSTHILSDVEKICDHVLVLTKCGIYSLEELKGKKSEENYSVRILIKVTKSEAKVLSHNYQIEKKDNEYALTLKGSKMDNKADLLAGFYQDLVSLKISPSAIEVIDNSLEELYLEVTK

SEQ ID NO: 10231 - DNA, 705 bp, Streptococcus agalactiae
atggtatgtgtcgattttattgatcaaaaagtttatagtgaagcagaaggcctatttgtttccgatttagacttaggcattaaaggtttaataagagcacgttatccttttgctctggatagtgactttatttcgtatggaaatttaagtcattattgtatgaattatcttgacgaaattgttcagcgagcgaatcagaaaaatgagaagataaaatataatgtgactaccttgatgaaagaagaagagaagcccttcaacgttgaagagcgtttgaacaagcaagcaactatcggtcaacgaattgctgatgatgttgcacgttttggcggatcttggacttttattatcgtttttgtatccattatggctatttggatgttggttaatatcatgaagccttttggtattcaatttgatccttacccatttatcctgttaaacttagctttatcaacgattgctgcaatccaagcaccacttattatgatgagtcaaaatcgtgctgctgattatgatcgtttgcaagctcgaaatgactttaatgtcaataaaacctctgagttagaaattagattattgcacgaaaagattgatcatatggtacaacaagatcagtttgaattgttagagattcaaaagttacagacagaaatgctagtatcattgggaaatcagttagcacaattgaaacaactacaaaaa

SEQ ID NO: 10232 - protein, 235 aa, Streptococcus agalactiae
MVCVDFIDQKVYSEAEGLFVSDLDLGIKGLIRARYPFALDSDFISYGNLSHYCMNYLDEIVQRANQKNEKIKYNVTTLMKEEEKPFNVEERLNKQATIGQRIADDVARFGGSWTFIIVFVSIMAIWMLVNIMKPFGIQFDPYPFILLNLALSTIAAIQAPLIMMSQNRAADYDRLQARNDFNVNKTSELEIRLLHEKIDHMVQQDQFELLEIQKLQTEMLVSLGNQLAQLKQLQK

SEQ ID NO: 10233 - DNA, 2235 bp, Streptococcus agalactiae
atggtaaaagtttcaaatttagggtatccacgtcttggtgaacagcgcgaatggaagcaagcgatcgaagctttctgggcagggaatcttgaacaaaaagatttagaaaaacaactaaaacaattacgtatcaatcatttaaagaaacaaaaagaggcaggtattgaccttattccagtgggggatttttcttgttatgatcatgttttggatttgtcatttcaattcaatgtaatcccaaagcgtttcgatgagtatgagaggaatttagacctttattttgctattgcaagaggtgataaagataatgtcgcatcatctatgaaaaagtggtttaataccaactaccactacatagtcccagaatgggaggttgagactaaacctcacttgcagaataattacttacttgatctttatctagaagctagggaagtagttggtgataaagcaaagccggttatcactggtccaataacctatgtttccttatcatcaggaattgtcgactttgaagcgactgttcagcggttattaccactttataagcaggtctttcaagatctgatagatgcaggcgccacctatattcagattgatgagccgatatttgtaactgatgaaggtgaacttttagtagatatagctaagtctgtttatgatttttttgcaagagaagtaccacaagcccacttcatctttcaaacctactttgaatcagcagtctgtttagataaactctctaagctgccagtaacgggatttggccttgattttatacatggtagggcggaaaatttagctgctgttaagcaaggtctattccgcgaaaaagaattatttgcaggaattgttaatggtcgaaatatctgggcagtaaatttagaagaaacgttggctttattggaagagataggtccctttgttaaacgattgactcttcaaccttcttcaagtcttttacatgtaccggtgacgactaaatacgaaacacatttagaccctgtgttaaagaatggcttatcatttgctgatgaaaaactaaaggaattagaactattagctagtgcttttgatggtaataaaacaaagggatatcacgaagctttatctcgtttttcagctcttcaagctgctgattttcgtcatgtagcattggaatcattagcagaagtaaagcttgaacgaagtccgtataaattacgccaagctttgcaagctgaaaaattacagttaccgattttaccaacaacaactattggatcctttcctcaatcacctgaaattaggaagaaacgccttgcttggaaaagaggaaatctatctgactcagattataaagatttcataaaaactgaaattagaagatggattgctattcaagaagatcttgatcttgatgtgttagtacatggcgaatttgagcgtgttgatatggttgaattttttggtcaaaagttagctggttttacgacaaccaaattaggctgggtacagtcttatggttcaagggcggtcaaaccacctatcatttatggtgatgtcaaacatattcaacccttaagccttgaagaaacggtttatgcccaaagtttgactaagaaacctgttaaaggcatgttgacaggtcctattactataacgaactggtcatttgagcgagatgatattagccgatctgatctttttaatcaaattgctttggctataaaagatgagattcaacttttggaacaatcaggtattgctattatacaagtggatgaagcagcccttcgagaaggtttacccttacgccagcaaaagcaacaggcttacttagatgatgctgttgcggcctttaaaattgcaacttcatctgtgaaagatgagacacaaattcatacacatatgtgttattcaaaatttgacgaaattattgattctatccgtgcactagatgcagatgttatttctattgaaacgagtagaagtcatggggacatcattgaaagttttgaaacagcagtttatcctctaggaattggcctgggtgtttatgatattcattcccctcgcatacctactaaggaagaaattattgtcaatattcaacgatcactaaaatgtctatcaaaagagcaattttgggtaaaccctgattgtggcttaaaaacacgccgtgaagcagaaacaattgctgccttggaggttcttgtttcagctaccaaagaggttcgtcagcaattagataat

SEQ ID NO: 10234 - protein, 745 aa, Streptococcus agalactiae
MVKVSNLGYPRLGEQREWKQAIEAFWAGNLEQKDLEKQLKQLRINHLKKQKEAGIDLIPVGDFSCYDHVLDLSFQFNVIPKRFDEYERNLDLYFAIARGDKDNVASSMKKWFNTNYHYIVPEWEVETKPHLQNNYLLDLYLEAREVVGDKAKPVITGPITYVSLSSGIVDFEATVQRLLPLYKQVFQDLIDAGATYIQIDEPIFVTDEGELLVDIAKSVYDFFAREVPQAHFIFQTYFESAVCLDKLSKLPVTGFGLDFIHGRAENLAAVKQGLFREKELFAGIVNGRNIWAVNLEETLALLEEIGPFVKRLTLQPSSSLLHVPVTTKYETHLDPVLKNGLSFADEKLKELELLASAFDGNKTKGYHEALSRFSALQAADFRHVALESLAEVKLERSPYKLRQALQAEKLQLPILPTTTIGSFPQSPEIRKKRLAWKRGNLSDSDYKDFIKTEIRRWIAIQEDLDLDVLVHGEFERVDMVEFFGQKLAGFTTTKLGWVQSYGSRAVKPPIIYGDVKHIQPLSLEETVYAQSLTKKPVKGMLTGPITITNWSFERDDISRSDLFNQIALAIKDEIQLLEQSGIAIIQVDEAALREGLPLRQQKQQAYLDDAVAAFKIATSSVKDETQIHTHMCYSKFDEIIDSIRALDADVISIETSRSHGDIIESFETAVYPLGIGLGVYDIHSPRIPTKEEIIVNIQRSLKCLSKEQFWVNPDCGLKTRREAETIAALEVLVSATKEVRQQLDN

SEQ ID NO: 10235 - DNA, 690 bp, Streptococcus agalactiae
atggaaaaaggatttaaagagggagtgaaagatgccttgcccacagctttagggtatatctcaataggcttggcgtttgggatagttgcttcagcatcagatttatctgcaatagaagttggtcttatgagtgccttggtatatgggggatctgctcagtttgctatgtgtgcgctattattagcaaaagcagacttgatgactattacgatgacagtatttttagttaatttgagaaatatgttaatgagtttacacgcgactactatcttcaagtctgctcacctaatgaatcaattagccataggaactctaataacagatgagagctacggcgttttacttggagaagcattacatcacaaagttgtatcgcctagttggatgcatggtaataatgtgatgagttatttgacatgggtaatctcaacgataataggaactttactggggagtactattcctaatccagaaatgtttggtttagactttgcattagtcgccatgtttataggtctctttgtatttcagttgtttgggatgttatctgatggaaagcgacttgttgtatatgttcttgcttctgtaggtttaagttacttcttattagctacttttttgtcaggagccttatcagtattgcttgcgactgttgttggatgtagtgtgggagttgttttagatgataaa

SEQ ID NO: 10236 - protein, 230 aa, Streptococcus agalactiae
MEKGFKEGVKDALPTALGYISIGLAFGIVASASDLSAIEVGLMSALVYGGSAQFAMCALLLAKADLMTITMTVFLVNLRNMLMSLHATTIFKSAHLMNQLAIGTLITDESYGVLLGEALHHKVVSPSWMHGNNVMSYLTWVISTIIGTLLGSTIPNPEMFGLDFALVAMFIGLFVFQLFGMLSDGKRLVVYVLASVGLSYFLLATFLSGALSVLLATVVGCSVGVVLDDK

SEQ ID NO: 10237 - DNA, 4710 bp, Streptococcus agalactiae
atgaacacaaaacagcgtttttcaatccggaaatataagttaggtgccgtatctgtacttttgggaaccctattttttttaggtggtatcacaaatgtagctgctgattctgtcataaataagccatctgatattgcagttgaacagcaagtaaaagacagtccaacgagcatagcaaatgagacacctactaacaacacgtcatcagcccttgcgtcgacagctcaagacaatcttgttacaaaggctaataatagtccaacagaaacacaaccagtagctgagtctcactctcaagccaccgagacattttccccagtcgcaaatcaaccggttgaaagcactcaagaagtttctaaaactcctttaaccaaacaaaatttagcagtcaaatctacaccagctatttctaaagaaacccctcaaaacattgatagtaataaaattatcactgtccccaaagtatggaacacaggctacaaaggagagggaactgttgtagcaattattgactcaggactagatatcaatcacgatgctctccaattaaatgattcgacaaaagcaaaataccaaaacgaacagcaaatgaatgctgctaaagcaaaagctggtataaactatggaaaatggtataacaacaaagtaatctttggtcacaactatgttgatgtcaatacagagctaaaagaggtgaaaagcacttctcatggtatgcacgtaaccagtatcgcaacagctaatcctagcaagaaagatacaaatgaattaatctatggtgttgctcctgaagcacaagtaatgtttatgagagtcttctctgatgaaaaaagaggaactggaccagccctttatgttaaagctattgaagatgccgttaaactcggtgctgacagcattaatttaagtttaggtggagctaatgggtctttagttaatgccgatgaccgacttataaaagctttagagatggctagactcgctggcgtttctgttgttatagcagcaggtaacgacggtacatttgggagtggagcatcaaagccttctgctctttatcctgattatggtttagttggtagtccatcaacagctcgtgaggccatttctgtagcatcatataataatacaacactggttaataaagtcttcaacattatcggattagaaaacaacagaaatctcaacaacggattagctgcttatgcagatcctaaagttagtgataagacctttgaagtagggaaacaatatgattatgttttcgtaggaaaaggaaacgacaatgattataaggacaaaactttaaatggtaaaatcgccttaattgaacgtggagatattacttttacaaaaaaagtcgtcaatgctattaatcacggtgctgtgggagctattatctttaataacaaagctggggaagctaatctaacaatgagtttagatcctgaagcaagtgctattcctgctatttttacccaaaaagagtttggagatgttttagctaaaaacaactataaaattgtatttaacaatatcaaaaataaacaagccaaccctaatgcaggtgtcctatctgacttttcaagctgggggttaacagcagacggacaattaaaacctgacttatctgctcctggaggctctatttacgccgctatcaatgataatgaatatgatatgatgagtgggacaagtatggcttctccccatgtcgctggtgctactgctctagttaaacaatacttattgaaagaacatccagaacttaaaaaaggtgacattgaaagaactgtcaaataccttcttatgagtactgctaaagcacacctaaacaaagatacaggcgcttacacctcaccacgccaacaaggagcaggtattatcgatgtcgcagcagcagttcagacaggattatacctaactggtggggaaaacaactatggcagcgttacattaggaaatattaaagataaaatttcctttgatgttactgttcataatatcaataaagttgcaaaagatttacactatacaacctatttaaatactgatcaagttaaagatggctttgtcacattggctcctcaacaacttggtacatttacagggaaaacgatacggattgaaccagggcaaacccaaacgattacaattgatatagatgtttcgaaataccatgacatgttaaaaaaagtaatgccaaacggctatttcctagaaggctacgtacgttttacagaccctgttgatggtggggaagttcttagtattccttatgttggatttaagggagaattccaaaacttagaagttttagaaaaatccatttataagcttgttgctaacaaagaaaagggattttatttccaaccaaaacaaacaaacgaagttcctggttcagaagattatactgccttaatgactacaagttcagagcctatctactcaacagacggtactagtcctatccaattgaaagccttgggaagctataagtctatagatggaaaatggatcttacaactagatcaaaaaggccagcctcatctagccatttcacctaatgatgaccaaaatcaagatgccgttgcagtgaaaggtgttttcttacgtaatttcaataatttaagagccaaagtctatcgtgcagatgatgttaatttacaaaaaccactatgggtaagtgctccccaagcaggagataaaaattactacagcggaaatactgaaaatccaaaatctacatttttatatgacacagaatggaaaggaaccactactgatggtattcctttagaagatggaaaatacaaatacgttttaacttattactctgatgtccctggctctaagccacaacaaatggtgtttgatatcactttggatagacaagctcctacactaacaacagcaacttatgacaaagatagacgtatcttcaaagctcgtcctgcagtagaacacggggaatctggtatctttagagaacaagttttttacttaaaaaaagataaagatggtcattataatagcgtcttacgtcaacaaggagaagacggtatccttgttgaagataacaaagtatttatcaaacaagaaaaggatggtagctttattctacctaaagaggttaacgatttctctcatgtctactatactgttgaagattatgcaggcaatctagtatcagcaaaactcgaagatttgatcaatattggcaataaaaatggtttagtaaacgtcaaagtgtttagccctgagcttaacagtaatgtcgatattgatttctcttactctgtcaaagatgacaaaggtaatatcatcaaaaagcaacatcacgggaaagacctcaatttattgaaattgccttttggtacctatacgtttgatctattcttatacgatgaggaacgagcaaatctaatcagtcccaaaagtgtcactgtaactatttctgaaaaagatagccttaaagacgtcttatttaaagttaacttactcaagaaagcagccttactcgttgaatttgacaagcttttaccaaaaggagcaacagtccagttggttactaagacaaatactgttgttgatctaccaaaagcaacttattctcctactgactatggtaaaaacatacctgtaggagactatcgtttaaacgtaacgctgcctagtgggtatagcactttagagaacttagatgatttacttgtatccgtaaaagaagatcaggtaaacctaacaaaattgacgctgattaataaagctcctctgattaatgccctagcagaacaaactgatattattacccagcctgtgttttataatgctggaactcacttaaaaaataattacctagctaatcttgaaaaggcacaaactttaattaaaaatagagtggaacaaacaagtattgataatgctattgctgctttgagagaaagtcgccaagctcttaacggtaaagaaacagatacttctttactggcaaaagctattttagctgaaacagaaatcaagggaaactatcaatttgttaatgctagtccattaagccaatcaacttatatcaatcaagtccaattggcgaaaaaccttctacaaaaacctaacgtcactcaatcagaagtagacaaagccttagaaaatcttgatattgctaaaaatcaattaaatggtcatgaaactgattactctggtttacaccatatgataattaaagcaaacgttctgaaacaaacatcatctaaatatcagaacgccagtcaatttgctaaagaaaattataataaccttatcaagaaagcagaattgctgctttccaatagacaagctacacaagctcaagttgaagagttattaaaccaaataaaagcaaccgaacaagagcttgatggccgtgatagagtttcttccgcagagaattatagtcaatcactcaatgataatgactctctcaataccacacctatcaatccgccaaatcagccccaggcgttgatattcaaaaaaggcatgactaaagaaagtgaggttgctcagaagcgtgtcttaggggtgactagccaaaccgataatcaaaaggtaaagacaaacaagcttcctaaaacaggcgaaagcactcctaaaataacctatacaatattgctatttagtctctctatgctaggtctggcaacaatcaaactaaagtctatcaaaagagaa

SEQ ID NO: 10238 - protein, 1570 aa, Streptococcus agalactiae; identical to SEQ ID NO: 8964

SEQ ID NO: 10239 - DNA, 684 bp, Streptococcus agalactiae
atgacaaaaataatttatttcgctgatgatgaaaagaatattcgtgacttggtggttccttttttagaacatgatggtttcactgttcgagcatttgaaactggagaccttctcttagaagcctataaaaaccaaaaacccgatttagttatattagacataatgatgcctggaactaatggtttagatgttatgaaaagcatccgccaatatgataatattcctattatcatgttaacagctagagattctgatgttgatttcattacggcttttaatttaggaactgacgattacttcaccaagcctttttcacctataaaacttagtctacatgttaaagcattgttcaaacgccttgatgaaaaagcaatcaaaaatgacactcagtatcagttcctagatttaactctggataccgaaaagcgaatagccctattatcaaatgaagaaatgcccttaaccaagacagaatttgattttcttttagtattaattgaaaaacctgaaactgctttttctagggaaacactgcttaatcgtatttggggatttgatgatattgaaagcagagcagttgatgacactattaaacgattacgtaaaaaatttaagcaataccacagtcaggttagtatcaaaactgtctggggttacggcttcaaattaatcaaagaggacaaa

SEQ ID NO: 10240 - protein, 228 aa, Streptococcus agalactiae
MTKIIYFADDEKNIRDLVVPFLEHDGFTVRAFETGDLLLEAYKNQKPDLVILDIMMPGTNGLDVMKSIRQYDNIPIIMLTARDSDVDFITAFNLGTDDYFTKPFSPIKLSLHVKALFKRLDEKAIKNDTQYQFLDLTLDTEKRIALLSNEEMPLTKTEFDFLLVLIEKPETAFSRETLLNRIWGFDDIESRAVDDTIKRLRKKFKQYHSQVSIKTVWGYGFKLIKEDK

SEQ ID NO: 10241 - DNA, 2499 bp, Streptococcus agalactiae
atgacattctataatcacaaagaaatcgaacccaaatggcaagctttttgggcagataatcatacctttaaaacaggaacagacgcatcaaaacctaagttttatgccctagatatgttcccatacccatctggagctggtctccacgttggtcacccagaaggctatacagcaacggatattctcagccgtttcaaacgtgcccaaggtcacaatgtcctccacccaatgggttgggatgcttttggacttcctgctgagcagtacgctatggatactggtaatgacccagctgagtttacagctgaaaacatcgctaacttcaaacgccagattaatgctcttggtttctcatacgactgggatcgtgaagttaacacaactgaccctaactactacaagtggacacagtggatctttaccaagctttatgaaaaaggtctagcttacgaagctgaagttccagttaactgggttgaagaattgggaacagctatcgccaacgaagaggttcttccagatggtacatcagaacgtggtggctacccagttgtcagaaaaccaatgcgccaatggatgctcaaaatcactgcctatgcagagcgcttgctggaagacttggaagaagttgactggccagagtcaatcaaggacatgcaacgcaactggattggtaaatcaactggtgctaatgtaaccttcaaggttaaggatacagataaggacttcactgtctttacaacacgtcctgacaccctttttggtgcgacttacgcagttcttgctcctgagcatgccttggttgatgctattacaacagctgaccaagcagaagccgttgccgaatacaaacgtcaagcgagtctcaaatcagaccttgctcgtacagaccttgccaaagaaaaaactggtgtctggacaggtgcctatgccattaacccagttaatggtaaagaaattccagtttggattgcggactatgtccttgctagctacggtacaggtgctatcatggcagttccagctcacgatgaacgtgactgggaattcgcaaaacaattcaacctagacatcattccagttcttgaaggtgggaatgttgaagaggctgcctttacagaagacggtcttcacatcaactcagacttcctagatggtctcgacaaagcggcagctattgccaaaatggtcgagtggcttgaagcagaaggtgttggtaatgagaaagttacttaccgtcttcgtgactggctcttcagccgtcagcgttactggggtgagccaatcccaatcatccactgggaagatggaacatcaactgcggttcctgagagcgaattgccactagttcttccagttactaaggatatccgtccttcaggtactggtgagagcccacttgctaacttgacagactggttggaagtcactcgtgaagatggcgttaaaggtcgtcgtgagaccaacaccatgccacaatgggcaggttcaagctggtactatctccgctacatcgatccacacaacactgaaaaactagctgacgaggaactcctcaaacaatggttgccagttgatatctatgtcggtggtgcagagcatgccgtgcttcaccttctctatgctcgcttctggcacaaggttctttatgatctcggtgtcgtacctaccaaagagccattccaaaaactctttaaccaagggatgattttgggaacaagctaccgcgacagccgtggtgctcttgtggcaactgacaaggttgaaaaacgtgatggcagcttcttccatgtggaaactggtgaagagcttgaacaagcacctgctaagatgtctaaatcacttaagaacgttgtcaatccagatgatgttgttgagcagtacggtgctgacacccttcgtgtttacgagatgttcatgggaccactcgatgcttcaatcgcttggtctgaagaaggtcttgaaggctcacgtaagttcttggaccgtgtttaccgtttgatcacgactaaagagatcactgaggaaaatagcggagctcttgacaaggtttacaacgaaactgttaaggcagttactgagcaagttgaccaaatgaaattcaacacagctatcgctcaactcatggtctttgtcaatgcagccaacaaggaagacaaactctttagcgactatgccaaaggctttgttcaattgattgcaccattcgcaccgcacttaggtgaagaactctggcaagtcttgacagcctcaggacagtcaatctcttacgtgccatggccaagctatgacgaaagcaaattggttgaaaacgaaatcgaaatcgttgtccaaatcaaaggtaaggtcaaagctaaactcgtcgttgctaaagacctttcacgcgaagaattgcaagatcttgctcttgctaacgaaaaagtccaagccgaaatcgcaggcaaagacatcatcaaagtcatcgcagtaccaaacaaactcgttaatattgtggtgaaa

SEQ ID NO: 10242 - protein, 833 aa, Streptococcus agalactiae
MTFYNHKEIEPKWQAFWADNHTFKTGTDASKPKFYALDMFPYPSGAGLHVGHPEGYTATDILSRFKRAQGHNVLHPMGWDAFGLPAEQYAMDTGNDPAEFTAENIANFKRQINALGFSYDWDREVNTTDPNYYKWTQWIFTKLYEKGLAYEAEVPVNWVEELGTAIANEEVLPDGTSERGGYPVVRKPMRQWMLKITAYAERLLEDLEEVDWPESIKDMQRNWIGKSTGANVTFKVKDTDKDFTVFTTRPDTLFGATYAVLAPEHALVDAITTADQAEAVAEYKRQASLKSDLARTDLAKEKTGVWTGAYAINPVNGKEIPVWIADYVLASYGTGAIMAVPAHDERDWEFAKQFNLDIIPVLEGGNVEEAAFTEDGLHINSDFLDGLDKAAAIAKMVEWLEAEGVGNEKVTYRLRDWLFSRQRYWGEPIPIIHWEDGTSTAVPESELPLVLPVTKDIRPSGTGESPLANLTDWLEVTREDGVKGRRETNTMPQWAGSSWYYLRYIDPHNTEKLADEELLKQWLPVDIYVGGAEHAVLHLLYARFWHKVLYDLGVVPTKEPFQKLFNQGMILGTSYRDSRGALVATDKVEKRDGSFFHVETGEELEQAPAKMSKSLKNVVNPDDVVEQYGADTLRVYEMFMGPLDASIAWSEEGLEGSRKFLDRVYRLITTKEITEENSGALDKVYNETVKAVTEQVDQMKFNTAIAQLMVFVNAANKEDKLFSDYAKGFVQLIAPFAPHLGEELWQVLTASGQSISYVPWPSYDESKLVENEIEIVVQIKGKVKAKLVVAKDLSREELQDLALANEKVQAEIAGKDIIKVIAVPNKLVNIVVK

SEQ ID NO: 10243 - DNA, 807 bp, Streptococcus agalactiae
atgagaggtctttatactgctggagttttagatgcttttctagatgcaggaataaaaatagatggtatcgtatctgtctctgctggtgcattgtttggtgttaattttgtatctagacaacgagagagggctttgcgatacaataaaaagtatttatcccaccctaaatatatgagtctaaggtcatggtttcgaacagggaattttgttaataaagatttcacctattatgaagttcctatgaaattggatgtatttgacgatgaagcatttaaaaaatcaagtattgatttttacgtagttgctacagagatgacatctggtaaacctgaatattttaaaattgatagtgtttttgaacaaatggaaattttacgtgctagttcagcattaccagtagtctcaaagatggttgattggcaggggaaaaagtacttagatggtggtttatctgatagtattcccgttgattttgcccgtggtttaggatttgacaagttgattgttgtgatgactaggccgctcaattatcagaaaaagccttcaagtggacgattgtataaaactctgtataggaaatatcctaattttgtaaagacagcctcgaatcggtaccaacagtataataatagtcttgaaaaggtcatgagccttgaaaaaacaggcgatctatttgcaattagaccgagtaagagcttggttattggccgcttagagaagaatccggataaacttgatagtatttatcagcttggtatgaaagatgctaaaagtgtgatgcctgagctgaatagttatctaatgaaa

SEQ ID NO: 10244 - protein, 269 aa, Streptococcus agalactiae
MRGLYTAGVLDAFLDAGIKIDGIVSVSAGALFGVNFVSRQRERALRYNKKYLSHPKYMSLRSWFRTGNFVNKDFTYYEVPMKLDVFDDEAFKKSSIDFYVVATEMTSGKPEYFKIDSVFEQMEILRASSALPVVSKMVDWQGKKYLDGGLSDSIPVDFARGLGFDKLIVVMTRPLNYQKKPSSGRLYKTLYRKYPNFVKTASNRYQQYNNSLEKVMSLEKTGDLFAIRPSKSLVIGRLEKNPDKLDSIYQLGMKDAKSVMPELNSYLMK

SEQ ID NO: 10245 - DNA, 1200 bp, Streptococcus agalactiae
atgcaatttatttatagtattattggtattttattggtattaggaattgtgtatgcaatttctttcaatcgtaagagtgtttctctaagtttaattggaaaagctcttatcgttcaattcattattgcgctaatcttagtacgtatcccactaggtcaacaagttgttagtgttgtttcaactggagttactaaagtaatcaactgtggtcaagctggattaaattttgtgtttggttcattagcagatagtggagcaaaaactggttttattttcgccattcaaacgcttggcaatattgttttcttatctgccctagttagtctactttattatgtaggaatccttggatttgtagtaaaatggataggtaagggcgttggtaaaattatgaaatcctcagaggttgagagttttgttgccgtagctaatatgtttcttggtcaaacagacagtccaattttggttagcaaatacctaggtcgtatgactgatagtgagataatggttgtgttggtatcaggtatgggaagtatgtcagtttctattcttggtggctacattgcattaggcattccaatggaatatctcttgattgcttcaacaatggttcctattggcagtattctcattgctaaaatcttattgcctcaaacagaacctgttcaaaaaattgatgacattaagatggataataaaggtaataacgccaatgtgattgatgcaatcgctgagggtgcaagcacaggtgcacaaatggctttctcaattggtgctagtttgattgcctttgttggtttagtttctttgattaatatgatgttaagtggattgggaatccgcttagaacaaatcttctcatatgtttttgctccatttggttttcttatgggatttgaccacaaaaacattcttctagaaggaaaccttcttggaagtaagttgattttaaatgagtttgtttcgttccaacaattgggtgacctaatcaaatctttagattatcgtacagcattggtagcaactatttcactttgtggttttgctaatttatcaagtttaggtatttgtgtttcaggtattgctgttctttgtccagagaaacgtggcaccctagctcgacttgttttccgtgcaatgattggtggtattgctgtaagtatgcttagcgcctttatcgtcggtattgtaactctattc

SEQ ID NO: 10246 - protein, 400 aa, Streptococcus agalactiae
MQFIYSIIGILLVLGIVYAISFNRKSVSLSLIGKALIVQFIIALILVRIPLGQQVVSVVSTGVTKVINCGQAGLNFVFGSLADSGAKTGFIFAIQTLGNIVFLSALVSLLYYVGILGFVVKWIGKGVGKIMKSSEVESFVAVANMFLGQTDSPILVSKYLGRMTDSEIMVVLVSGMGSMSVSILGGYIALGIPMEYLLIASTMVPIGSILIAKILLPQTEPVQKIDDIKMDNKGNNANVIDAIAEGASTGAQMAFSIGASLIAFVGLVSLINMMLSGLGIRLEQIFSYVFAPFGFLMGFDHKNILLEGNLLGSKLILNEFVSFQQLGDLIKSLDYRTALVATISLCGFANLSSLGICVSGIAVLCPEKRGTLARLVFRAMIGGIAVSMLSAFIVGIVTLF

SEQ ID NO: 10247 - DNA, 735 bp, Streptococcus agalactiae
atgcctaaaaatgaactaaataataaactaaataaactaaagcatgtacaagtctacaataagatttttaacatgattcaagacggtacttattctcctggaatgcaattaccttctgaacccgaattagcagggcaacttaatgttagtcgagctactttacgaaagtcattagcactattacaagaagaccatttggttaaaaatatcagaggaaaaggtaatttcattagagaaaattctagcaacttgtctgaaaacggttacgaaaatagacaacaccctattaaaacttgtctaacttccaaaattacagaagtagaattagaatttcgtgtagaggttcctgcagaagctatcacagcttcacttaaacaagaaacccctgtagttgttattgctgatcgttggtaccacaccgatgatggaccattagcttacacactttcttttatccctatcgaacttatttcagatgctgagatttctttacatgatactaaacagttgttaaacttcattgaagaaggtatctatcaagaaggcatatcaagccactcacaaagccatttgggatatgcgacatctggcaatttttcagcaactaaatataccctatccgatcatggacaattcatattaatacaagaaacaatttttaagcaagagaaaatactaatgtgtaataagcattacgttcccattgagcactttgaattgtccattacctctcat

SEQ ID NO: 10248 - protein, 245 aa, Streptococcus agalactiae
MPKNELNNKLNKLKHVQVYNKIFNMIQDGTYSPGMQLPSEPELAGQLNVSRATLRKSLALLQEDHLVKNIRGKGNFIRENSSNLSENGYENRQHPIKTCLTSKITEVELEFRVEVPAEAITASLKQETPVVVIADRWYHTDDGPLAYTLSFIPIELISDAEISLHDTKQLLNFIEEGIYQEGISSHSQSHLGYATSGNFSATKYTLSDHGQFILIQETIFKQEKILMCNKHYVPIEHFELSITSH

SEQ ID NO: 10249 - DNA, 795 bp, Streptococcus agalactiae
atggtaaggctaatatttagtgatattgatggtactttaattaacagtaattttaaagtaacacctaagacacggcagggaattaaacaaatagtagctcaaggggctactttcgttcccatatcagctaggatgcctgaggcaattactccgattatggaacaaattggaatagattcttatattatttcctataatggggctttaatacaagatatgcaacaaaaaacaattgcttcccacacaatggatggtcaagttgccttacaagtttgttcttatgtaagcaagcattattcgaaaattgcatggaatgtctatcgttatcatgaatggtattcctgtgataaagaaaatgagtgggtccaaaaagaggaggagattgttggtttacaatctaaagagatgagtttgatggagttagagaagcaagataggattcataaacttctcttgatgggagaaccatctctgatgggagaattggagaacactttgaaagctcaatatccacatttatcaatcgcacaatctgctccttactttattgaaataatggctccaggtattgaaaaaggaaaatctgctaaaactttagcagactatttagatatttctcttgcagactctattgcgtttggtgataactataatgatttaaatctgcttgaaattgtgggtaaaggttttgtcatggggaatgctcctaaagatttacaagagagaattggaaatgtaactcaggataatgataacgatggtatttattatgctttagtagagtatatggaaaat

SEQ ID NO: 10250 - protein, 265 aa, Streptococcus agalactiae
MVRLIFSDIDGTLINSNFKVTPKTRQGIKQIVAQGATFVPISARMPEAITPIMEQIGIDSYIISYNGALIQDMQQKTIASHTMDGQVALQVCSYVSKHYSKIAWNVYRYHEWYSCDKENEWVQKEEEIVGLQSKEMSLMELEKQDRIHKLLLMGEPSLMGELENTLKAQYPHLSIAQSAPYFIEIMAPGIEKGKSAKTLADYLDISLADSIAFGDNYNDLNLLEIVGKGFVMGNAPKDLQERIGNVTQDNDNDGIYYALVEYMEN

SEQ ID NO: 10251 - DNA, 858 bp, Streptococcus agalactiae
atgtcgtatccatacaaagccaatcattccattgaatcaatcaccttaaaagtaaatgacctcgaaaacctcgtaaacttctatagcgatatcattgggttaactgttattgacaaatcaagcactagagccttactaggggtaaatcaaaaaatccctcttattatccttgaaaaaactgaacttgaaaagcatagtacctatggcctttatcacactgctattttagtaccagatgaataccatctcagtctagctctaaatcatttattatctcagcatatccctctagagggtggagctgaccatggctatagcaatgctatctatctaagtgatcctgaaggtaatggaattgaaatttataatgataaggatatctctatgtgggatatcagagagagtggacaaattattggtattactgaaagactagatattgacaatttacttgacagccttgtcaacgttcctaataattataagctttctgaaaaaactagtattggtcatattcatttgagtgttaaagatgctaagattagctcaaaactctatcaaaatgtttttggccttgatgagaaatttgcaatcccgacagctagttggattgcatccggcaactaccatcatcatctagcctttaataattgggctggtccaaatctttctaaaaaccaagaagatagacccggaatttccttattgacaattgcttacaatgatgacaacctttttagagatagcttaaaaaaagcgcaactttaccaactgactttccttgaaaaacaagatcattattatattattgaagattttgatggcatccgaattaaagttgttctaaaaccagagaat

SEQ ID NO: 10252 - protein, 286 aa, Streptococcus agalactiae
MSYPYKANHSIESITLKVNDLENLVNFYSDIIGLTVIDKSSTRALLGVNQKIPLIILEKTELEKHSTYGLYHTAILVPDEYHLSLALNHLLSQHIPLEGGADHGYSNAIYLSDPEGNGIEIYNDKDISMWDIRESGQIIGITERLDIDNLLDSLVNVPNNYKLSEKTSIGHIHLSVKDAKISSKLYQNVFGLDEKFAIPTASWIASGNYHHHLAFNNWAGPNLSKNQEDRPGISLLTIAYNDDNLFRDSLKKAQLYQLTFLEKQDHYYIIEDFDGIRIKVVLKPEN

SEQ ID NO: 10253 - DNA, 2169 bp, Streptococcus agalactiae
atgacagaatctgatatcaaagtgattaaacgtgacgggcgtttggtcagctttgataagtataaaatctacacggctctattaaaagctagtaataaagttatcaaaatgtctcctttagttgaggctaaacttgagatgattgcagatcatgtcatcgctgagatctacaatcgttttaaagataacatcaagatatatgaaatacaaaatatcgttgaacataaattattggaagctaatgagtacgctattgcacaagaatatatcaattatcgtacccaacgcgattttgagcgttcacaggctacagatatcaatttttctattggaaaattaattaataaggatcaaactgttgttaatgagaatgctaataaagactctgatgtgtttaatacccaacgtgatttaacagcaggtattgtagggaaatcaattggtctgaaaatgttaccttctcatgtagcaaatgcacatcaaaagggtgatatccattatcatgatttagattacagcccatacactcccatgacaaattgctgtttaatcgattttaagggaatgcttgcaaatggttttaagattggtaatgcagaagttgagagtccaaaatctattcagacagcgactgctcagatttcacagattattgcgaacgttgcttcaagtcaatatggtggctgtacagcagatcgcattgatgagtttttagctccttatgcacagttaaattatcaaaaacatttaaaagatgcaaaagaatgggttattgaagataaacaagaagactatgcgcgcgctaaaacacaaaaagatatatatgatgccatgcaatctttggagtatgaaattaatactttatttacttcaaatgggcaaacgccatttacttcgcttggttttggattaggaactaattggtttgaacgagaaattcaaaaagcgattttgaaaattcggattcaaggtttaggaagcgagcatcgtactgctatttttccaaaattaatttttacgcttaaaaaaggtcttaatttagaagaagatagccccaattatgatattaaacaattagcattagagtgtgcgacaaaacggatgtatccagatgtcctttcttatgataaaattattgacttaacgggctcttttaaagcccctatgggctgtcgttctttcctacaagggtggcgagatgcaaatggtcaggatgtaacatctggtcgtatgaatcttggagttgtaacagttaatctaccgcgtgttgccatggagtctaacggtgatatggataaattctgggagatatttaatgaacgtatgagtattgctagagatgccttggtttatcgtgtggaacgtgtcaaagaggctatcccagcaaatgcgcccattctttaccagtatggagcatttggagaacgtttaggaaaatatgacaatgttgatcgactctttaatcaccgccgtgcaacggtgtctcttggttatattggtttatatgaggtggcgagtgttttttatggtggtgactgggaagataaccatcaagctaaagcatttactgtagacatcgttcgtaagatgaagcagttatgtgcagattggtctgatgagtatgattatcatttttcagtttattcgacaccatcggagagcttgactgaccggttttgtcgtttagatactgaaaaatttggtatagtaactgatattactgataaggaatactacactaattcattccattatgatgtgcgtaagaatccaacaccttttgaaaaactagattttgagaaaatctatcctgaaacgggtgcatcaggaggatttattcactactgtgaataccctgttttgcaacagaatccaaaagctttagaagcagtttgggactatgcttatgatcgggtaggttatctaggtactaatacaccgattgataagtgttaccaatgtcaatttgaaggggattttacaccgacagatcgaggttttacttgtccaaattgtggtaacagcgaccctaagacagtagatgttgtcaaacgtacatgtggttatttaggtaatccacaggctcgtccgatggttaatggtcgtcataaggaaatctctgctcgtgtaaaacatatgaacggatcaagtattaaaaatcaaggtaat

SEQ ID NO: 10254 - protein, 723 aa, Streptococcus agalactiae
MTESDIKVIKRDGRLVSFDKYKIYTALLKASNKVIKMSPLVEAKLEMIADHVIAEIYNRFKDNIKIYEIQNIVEHKLLEANEYAIAQEYINYRTQRDFERSQATDINFSIGKLINKDQTVVNENANKDSDVFNTQRDLTAGIVGKSIGLKMLPSHVANAHQKGDIHYHDLDYSPYTPMTNCCLIDFKGMLANGFKIGNAEVESPKSIQTATAQISQIIANVASSQYGGCTADRIDEFLAPYAQLNYQKHLKDAKEWVIEDKQEDYARAKTQKDIYDAMQSLEYEINTLFTSNGQTPFTSLGFGLGTNWFEREIQKAILKIRIQGLGSEHRTAIFPKLIFTLKKGLNLEEDSPNYDIKQLALECATKRMYPDVLSYDKIIDLTGSFKAPMGCRSFLQGWRDANGQDVTSGRMNLGVVTVNLPRVAMESNGDMDKFWEIFNERMSIARDALVYRVERVKEAIPANAPILYQYGAFGERLGKYDNVDRLFNHRRATVSLGYIGLYEVASVFYGGDWEDNHQAKAFTVDIVRKMKQLCADWSDEYDYHFSVYSTPSESLTDRFCRLDTEKFGIVTDITDKEYYTNSFHYDVRKNPTPFEKLDFEKIYPETGASGGFIHYCEYPVLQQNPKALEAVWDYAYDRVGYLGTNTPIDKCYQCQFEGDFTPTDRGFTCPNCGNSDPKTVDVVKRTCGYLGNPQARPMVNGRHKEISARVKHMNGSSIKNQGN

SEQ ID NO: 10255 - DNA, 1485 bp, Streptococcus agalactiae
atgagtaaacgaacggctatcagaatgaagaaatctagtcgattttcaattttactatatagtgttttgtcaactctcttagcaattgcaaatcctttattgacttattttgcaaatggtttgcagactcagaatctctatacaggtttgatgatgaccaaaggacagatcccttatagtgatgtttttgctacaggaggatttttatactatgtaacgattgctctaagttaccttttagggtctagtatctggttacttattgtacagtttattgcttactatgtatctggaatttatttttataaattagtttattatgtggcacaaagtgaaattgtctcgataggcatgacgttgattttctatataatgaatattgtcttaggattcggtggtatgtacccaatacagtgggcattaccttttatgctcatttcgctatggtttttaattaaattttgtgtcgataatatcgttgatgaagcatttatattttatggcattttagcagcattctcactatttatagatccccaaacactgattttttggctttgctcttttgttctcttaacagcaaccaatattaagcaaaagcagtcactacgaggattttatcagtttttatgcgttgtttttggtatgattttaattgcttatactgttggttactttatgtttaatctacagattatctcttcttatattgacaaagctattttttacccctttacgtatttcgctaggacaaaccactcattccttcttagtttagcaattcaaattgttgtccttctagggtcaggttgtctctttggactatgggattttattcaaaatcgtaaaaaagcatcttatcaaatcggcttgaactttattgcctgtatttttattatttacgctataatggccattttttcaagagattttaacctttaccactttttacctgctttaccatttggtcttttgctaacgagtaataaaattactattctttaccaaaaagtgattgacagacgttcacatagacgtcagtatttctctggtaaatctcttatcgtagacctttttgtaaagaaaacatattatttgcccctcttactagtttccttatcgatagggttactagtttataatacttatcaaaatgttactcttagtaaagaaaggcgtgacatttcacattatttgactacaaaaattgatagagatggtaagatttatgtttgggacaaagttgctagcatttatagccagactcggttaaaatctgcttctcaatttgttttgccacatattaatacagcgcaaaaaaataatgagaaaattttgaaggacgagctgcttcagcatggggctaaatactttatcttaaataaaaatgagaagttaccaaatgaactgaaatctgatattaagaagcactaccaagaagttcctctatcaaatatcactcattttgttctatatcgtttcaaa

SEQ ID NO: 10256 - protein, 495 aa, Streptococcus agalactiae
MSKRTAIRMKKSSRFSILLYSVLSTLLAIANPLLTYFANGLQTQNLYTGLMMTKGQIPYSDVFATGGFLYYVTIALSYLLGSSIWLLIVQFIAYYVSGIYFYKLVYYVAQSEIVSIGMTLIFYIMNIVLGFGGMYPIQWALPFMLISLWFLIKFCVDNIVDEAFIFYGILAAFSLFIDPQTLIFWLCSFVLLTATNIKQKQSLRGFYQFLCVVFGMILIAYTVGYFMFNLQIISSYIDKAIFYPFTYFARTNHSFLLSLAIQIVVLLGSGCLFGLWDFIQNRKKASYQIGLNFIACIFIIYAIMAIFSRDFNLYHFLPALPFGLLLTSNKITILYQKVIDRRSHRRQYFSGKSLIVDLFVKKTYYLPLLLVSLSIGLLVYNTYQNVTLSKERRDISHYLTTKIDRDGKIYVWDKVASIYSQTRLKSASQFVLPHINTAQKNNEKILKDELLQHGAKYFILNKNEKLPNELKSDIKKHYQEVPLSNITHFVLYRFK

SEQ ID NO: 10257 - DNA, 408 bp, Streptococcus agalactiae
atgggacttgacgtcggctcgaaaactgtcggcgttgcaattagtgatccactcggtttcactgcacaaggtcttgaaatcattaagatcgatgaagaatctggaaattttggttttgaccgcttagcagagttagtaaaagagtacaaagttgataaatttgtagttggtctacctaaaaatatgaataatacaagtggtcctcgtgtagaggctagtcaggcatatggcgataaaatcactgaattattcaatcttccagttgaatatcaagatgaacgtttaacgactgttcaagcagagcgtatgctagttgagcaagctgatattagtcgtggtaagcgtaagaaagttatcgataaattagcagctcaactaatcttacaaaattatttagaccgcatgttt

SEQ ID NO: 10258 - protein, 136 aa, Streptococcus agalactiae
MGLDVGSKTVGVAISDPLGFTAQGLEIIKIDEESGNFGFDRLAELVKEYKVDKFVVGLPKNMNNTSGPRVEASQAYGDKITELFNLPVEYQDERLTTVQAERMLVEQADISRGKRKKVIDKLAAQLILQNYLDRMF

SEQ ID NO: 10259 - DNA, 396 bp, Streptococcus agalactiae
atgattaagatttatactatttcaagttgcacaagttgtaaaaaagcaaaaacttggctaaatgctcatcaacttccatataaagaacaaaacctaggtaaagaatcactaacacgtgatgaaattttagaaatattaacaaaaactgaaagtggtattgaaagtatcgtttcttctaaaaatcgttatgctaaggcgctcaattgtaatattgaggagttgagtgtaaatgaagttattgatcttattcaagaaaatccacgtattttaaagagtccaattctaattgatgacaaacgtcttcaagtaggttataaggaagatgatattcgtgcttttctacctcgctctattcgtaacgttgaaaatgcagaagctcgtcttcgtgcagcactt

SEQ ID NO: 10260 - protein, 132 aa, Streptococcus agalactiae
MIKIYTISSCTSCKKAKTWLNAHQLPYKEQNLGKESLTRDEILEILTKTESGIESIVSSKNRYAKALNCNIEELSVNEVIDLIQENPRILKSPILIDDKRLQVGYKEDDIRAFLPRSIRNVENAEARLRAAL

SEQ ID NO: 10261 - DNA, 816 bp, Streptococcus agalactiae
atggttttaccaggtccgcctagtgaattaaagccaatggttatggagcaggtagtacctattttgtcaaataatggcacaaaattatattcacgtgtattgagattctttggtatcggtgagagtcagttagtcacaatcttagaagacataattaagaatcagacagacccaactatagcaccatatgcaaaggttggtgaggtaactttaaggttatcaacgaaagctgaaaatcaggatgaggccgactttaaattagatagcttagaaaaagaaatacttgctcttaagacattagataaccgtaaattaaaagatttattatatggttatggtgataataatagtatggcacgtactgttttagaattattgaaagtacaaaataaaacgattactgccgcagagagcttaacagcagggttatttcaatctcagttagcagaattttctggtgcttcgcaagtttttaatggtggttttacgacctatagtatggaagcaaaatcacaacttctcggcatccctaagaaaaaattgcaagaatatggagttgtcagtcattttacagctgaggcaatggctcagcaagctcgccaacttttaaaagcagattttggtatcggtttaacgggagttgctggtcctgatgagttggaaggataccctgcaggtacagtttttattgggattgcaacccctgaaggcgtttcttctattaaagtatcgattggagggaagagtcgctcagatgtccgtcatatcagtactttacatgcttttgacttggtgcgtagggctttattaaagata

SEQ ID NO: 10262 - protein, 272 aa, Streptococcus agalactiae
MVLPGPPSELKPMVMEQVVPILSNNGTKLYSRVLRFFGIGESQLVTILEDIIKNQTDPTIAPYAKVGEVTLRLSTKAENQDEADFKLDSLEKEILALKTLDNRKLKDLLYGYGDNNSMARTVLELLKVQNKTITAAESLTAGLFQSQLAEFSGASQVFNGGFTTYSMEAKSQLLGIPKKKLQEYGVVSHFTAEAMAQQARQLLKADFGIGLTGVAGPDELEGYPAGTVFIGIATPEGVSSIKVSIGGKSRSDVRHISTLHAFDLVRRALLKI

SEQ ID NO: 10263 - DNA, 549 bp, Streptococcus agalactiae
atgaaacgatgttcttgggtgaatttagataatccattatatgtagcttaccatgataaagagtgggggagagctgttcatgacgatcatgtactctttgagttactatgtttagaaacttatcaatcgggtttatcttgggaaacagtattaaataaacgtcaggagttcagacaagtttttcatcactataatattgaaaaggtagctgcaatgtcagatgcggatttagagataatcttacaaaatcctagggttattcgtcatcgtctaaaacttttctcaacacgacaaaatgctaggtcaattatattaattcagaaagaattcggaagttttgatcgctacatttggtcttttgtagataataaagtacaggttaactcagttaacaactacaacgatgtgcctgcaagtactaccttatccgaacgcttatctaaggatttaaaaaaacgcggttttaaatttgttggtccaacttgcctctattcttttattcaggccgcgggtatggttaatgaccatgaaaatatatgtgatttcaag

SEQ ID NO: 10264 - protein, 183 aa, Streptococcus agalactiae
MKRCSWVNLDNPLYVAYHDKEWGRAVHDDHVLFELLCLETYQSGLSWETVLNKRQEFRQVFHHYNIEKVAAMSDADLEIILQNPRVIRHRLKLFSTRQNARSIILIQKEFGSFDRYIWSFVDNKVQVNSVNNYNDVPASTTLSERLSKDLKKRGFKFVGPTCLYSFIQAAGMVNDHENICDFK

SEQ ID NO: 10265 - DNA, 1230 bp, Streptococcus agalactiae; identical to SEQ ID NO: 8725

SEQ ID NO: 10266 - protein, 410 aa, Streptococcus agalactiae
MKEFFALPKQLQLRELLRFISITVGSAIFPFMAMYYVQYFGNLVTGILIIITQLSGFVATLYGGHLSDAMGRKKVVIIGSLLATIGWAITIAANVPNHITPHLTFVGILIIEIAHQFYFPAYEAMTIDLTNEQNRRFVYTIGYWLVNIAVMLGSGIAGIFYDHHFFELLIVLLIISAICCFVVYFKFDETKPQEGTFKHDKGVLGTFKNYSQVLVDKAFVVYTLGAIGSSVVWLQVDNYFSVNLKQNFEVVSILGHTITGAKMLSLAVFTNTLLIVLLMTTINKFIENWPLKRQLILGSLICGFGMLFNISLNTFGAILIAMTFFTFGEMIYVPASQVLRAEMMVEGKIGSYSGFLAIAQPVASVLAGAMVSLSYFTGKIGVQITLTIFMLAGLVLILYATKMKNIEIGK

SEQ ID NO: 10267 - DNA, 1977 bp, Streptococcus agalactiae
atgaacttgtctaaaattattgaattaccggatatattagctaaccagattgctgctggtgaggttgttgaaaggcctagtagcgtcgttaaagaattagttgaaaatgccatagatgcaggaagtagccaaattaccatagaggttgaagaatctggtcttaaaaagattcaaataacggataacggtgaagggatgactagtgaggatgccgttctcagtttacgacgtcacgctacatccaaaatcaaaagccagagtgacctttttcgtattcggaccttaggttttcgtggtgaagctctaccatcaatcgcttcgattagtttaatgacgataaaaacagctacagagcaagggaaacaagggacgttacttgttgctaaagggggaaacattgaaaaacaggaagttgtttcaagtcctcgtggaacaaaaattttagttgaaaatttattctttaacacgcctgccagattgaaatacatgaagagtttacagtctgaactagctcatattattgatattgttaatagactcagtctagcgcatccggaagttgcttttacactgataaatgatggtaaagaaatgactaaaactagtgggactggcgatttgagacaggcgattgcaggtatttatggtttaaatactgcaaaaaaaatgattgagatttcaaatgcagatttagattttgaaatttcgggttatgtaagtttgcctgaattgacacgagctaaccgaaactatattaccctattaattaacggtcgttacattaaaaattttcttttgaaccgctcaattctagatggttatggttcaaagttgatggttggaagatttccaattgctgtcattgatattcagatagatccttatctagcagatgtcaacgttcatccgactaagcaagaggtgagaatttctaaggaacgagaattaatgagtttaataagcacagcaatttctgagagtcttaaacaatatgacttgattccggatgctttagagaatttagctaaaactagtacccgaagtgtagataagcctatacaaacaagcttctcactaaaacagcctggtttgtattacgatagggctaaaaatgacttttttataggtgcagatactgtatctgaacctattgctaactttacaaaccttgacaaaagtgacggttcagttgacaatgatgtaaaaaactctgttaatcaaggagcaacgcagtctcctaatataaagtatgctagtagagatcaagctgatagtgagaacttcattcattctcaggattaccttagtagtaaacagtcacttaacaaacttgttgaaaaattagattcggaagaaagttcgacttttccagagctcgaattttttggtcaaatgcatgggacctacttatttgctcaagggaatggtgggttgtatattattgatcaacatgcagctcaagagcgtgtaaaatacgagtattaccgtgaaaagataggtgaggttgataatagtcttcaacaattgttagtaccatttctatttgaattttcaagttcagattttcttcaattacaagaaaaaatgtcattattacaagatgttggtattttcttggaaccgtatggtaataatactttcattttaagggaacatccaatttggatgaaagaagaagaggtagagtctggcatttatgaaatgtgtgatatgttgttgctcactaatgaagtatcagtgaaaaaatatcgcgcagagttggctattatgatgtcttgcaagcgatctattaaagcaaaccatacgctagacgattactcagcacgtcatttattagatcagttagcgcaatgtaaaaatccttataattgccctcatggaagacctgttttagttaattttacaaaagctgatatggagaaaatgtttaaacgaatccaagaaaatcatacaagcctcagggatttaggaaaatat

SEQ ID NO: 10268 - protein, 659 aa, Streptococcus agalactiae
MNLSKIIELPDILANQIAAGEVVERPSSVVKELVENAIDAGSSQITIEVEESGLKKIQITDNGEGMTSEDAVLSLRRHATSKIKSQSDLFRIRTLGFRGEALPSIASISLMTIKTATEQGKQGTLLVAKGGNIEKQEVVSSPRGTKILVENLFFNTPARLKYMKSLQSELAHIIDIVNRLSLAHPEVAFTLINDGKEMTKTSGTGDLRQAIAGIYGLNTAKKMIEISNADLDFEISGYVSLPELTRANRNYITLLINGRYIKNFLLNRSILDGYGSKLMVGRFPIAVIDIQIDPYLADVNVHPTKQEVRISKERELMSLISTAISESLKQYDLIPDALENLAKTSTRSVDKPIQTSFSLKQPGLYYDRAKNDFFIGADTVSEPIANFTNLDKSDGSVDNDVKNSVNQGATQSPNIKYASRDQADSENFIHSQDYLSSKQSLNKLVEKLDSEESSTFPELEFFGQMHGTYLFAQGNGGLYIIDQHAAQERVKYEYYREKIGEVDNSLQQLLVPFLFEFSSSDFLQLQEKMSLLQDVGIFLEPYGNNTFILREHPIWMKEEEVESGIYEMCDMLLLTNEVSVKKYRAELAIMMSCKRSIKANHTLDDYSARHLLDQLAQCKNPYNCPHGRPVLVNFTKADMEKMFKRIQENHTSLRDLGKY

SEQ ID NO: 10269 - DNA, 435 bp, Streptococcus agalactiae
atgaataaaatagaacgccaaaaacgtattaaacgtttgatccaatcagggcagattggcacacaagaagaaattaaattacatttaaaaaatgaaggaatcgatgtcacgcaagcgactctatcaagagacttgcgtgagattggtcttttaaaattacgtagcccagaaggtaagctatattatagtttatcaacagctacttcaaatcgatttagcccagccttacgctcatatattttgaaagtatcgcgagcaagttttatgttagttttaaatactaatttaggggaggctagcgttttagcaaactttattgatgagaaagggctgccagagattttaggaacaatggcaggagcagacaccttgttggtgatttgtcaaaatgaagatattgccaaagtttttgaaaaagaactatcagtaggttta

SEQ ID NO: 10270 - protein, 145 aa, Streptococcus agalactiae
MNKIERQKRIKRLIQSGQIGTQEEIKLHLKNEGIDVTQATLSRDLREIGLLKLRSPEGKLYYSLSTATSNRFSPALRSYILKVSRASFMLVLNTNLGEASVLANFIDEKGLPEILGTMAGADTLLVICQNEDIAKVFEKELSVGL

SEQ ID NO: 10271 - DNA, 1689 bp, Streptococcus agalactiae
atggatacaaaacatctaattgcgagtgaaattcaaaaagttgttccagatatggaacaatcgaccattctttctttattagaaaccccaaaaaattcgagcatgggagatttagctttcccagcattctctttggctaaaactctacgcaaagcacctcaaataattgctagtgacattgctgaacaaattaaaagcgaccaatttgaaaaggtggaagctgttggaccttacgttaactttttccttgataaagccgcaatctcaagtcaagttttaaaacaagtcttatctgatggttctgcctatgctactcaaaatattggtgaaggacgaaatgttgccattgacatgtctagtccaaatattgctaagccattctcaattggacaccttcgttcaacagttattggtgatagtttagctaatatttttgataaaattggctatcatcctgttaaaattaatcaccttggcgactggggtaaacaatttggaatgttaatcgttgcctataaaaaatggggcaatgaagaggctgtccgtgctcatcccatcgatgaacttttaaaactttatgtccgtattaatgctgaagccgagacagaccctagcgttgatgaagaggcacgtgagtggtttcgtaaacttgaagctaacgatcctgaagcaactgaattatggcaatggttccgtgacgagtcattattagaattcaaccgtctttacgatcaaatgaatgttacatttgatagctataacggcgaggcattctacaacgacaaaatggatgaagtgcttgaactgctagaatctaaaaacctcctagtcgaatctaaaggtgcacaagttgttaacctagaaaaatacggtattgaacatcctgccctcattaaaaaatccgatggagcaactctctacattacacgtgacttagctgctgcactttaccgtaaacgtacctacgattttgcaaaatcaatctacgttgtaggaaacgaacagtctgcacactttaagcaactaaaagctgtgcttaaagaaatggactacgattggtccgatgatatgactcatgttccttttggccttgtaacaaaaggaggagcaaaattatcaactcgtaaaggaaatgtaattctacttgaacctactgttgcagaagctattaatcgtgcggcatctcagattgaagctaaaaaccctaacctagcagataaagataaagttgctcaagcagttggtgtaggtgctattaaattttacgatttgaaaactgatcgtacaaatggttatgactttgacttagaagcaatggtatcatttgaaggtgaaactgggccatatgtacaatatgcacatgctcgtattcaatcaatcttacgtaaagctaactttagcccatctaatagcgataattacagtctcaacgatgttgaaagctgggaaatcatcaaactcatccaagattttcctcgtattattgtacgtgcggcagataattttgagccctctattattgcaaaattcgctattaatttagctcagtgcttcaataaatattacgcccacacacgtattttagatgaagacgctgaaatcagtagtcgtctagcactttgctatgcaactgctacagtattaaaagaatctcttcgcctcctaggagttgatgctccgaatgaaatg

SEQ ID NO: 10272 - protein, 563 aa, Streptococcus agalactiae
MDTKHLIASEIQKVVPDMEQSTILSLLETPKNSSMGDLAFPAFSLAKTLRKAPQIIASDIAEQIKSDQFEKVEAVGPYVNFFLDKAAISSQVLKQVLSDGSAYATQNIGEGRNVAIDMSSPNIAKPFSIGHLRSTVIGDSLANIFDKIGYHPVKINHLGDWGKQFGMLIVAYKKWGNEEAVRAHPIDELLKLYVRINAEAETDPSVDEEAREWFRKLEANDPEATELWQWFRDESLLEFNRLYDQMNVTFDSYNGEAFYNDKMDEVLELLESKNLLVESKGAQVVNLEKYGIEHPALIKKSDGATLYITRDLAAALYRKRTYDFAKSIYVVGNEQSAHFKQLKAVLKEMDYDWSDDMTHVPFGLVTKGGAKLSTRKGNVILLEPTVAEAINRAASQIEAKNPNLADKDKVAQAVGVGAIKFYDLKTDRTNGYDFDLEAMVSFEGETGPYVQYAHARIQSILRKANFSPSNSDNYSLNDVESWEIIKLIQDFPRIIVRAADNFEPSIIAKFAINLAQCFNKYYAHTRILDEDAEISSRLALCYATATVLKESLRLLGVDAPNEM

SEQ ID NO: 10273 - DNA, 1749 bp, Streptococcus agalactiae
atgaaacgtagtatgtatgctgggcgtgttcgtagtgagcacataggaacatcgattactttaaaaggatgggttggtcgtcgtcgtgaccttggaggccttatttttattgatcttcgcgatcgcgagggaatcatgcaattagttattaatcctgaagaagtatcagcctcagttatggcaaccgcagaaagtctccgtagtgaatttgttatagaggttagcggtgtagtgacagcacgagaacaagctaatgataatttaccaacaggagaagttgaattaaaagtgcaagaattatcgattcttaatacctcgaaaacaacaccatttgaaattaaagatggtattgaggcaaatgatgatacacgcatgcgttaccgttacttggatcttcgtcgtccggaaatgcttgaaaatttcaaattacgtgcgaaagtaacacactcaatccgtaattaccttgacaacttagagtttattgatgtcgaaactccgatgctaacaaaatcaactccagagggggcacgagactatttggttccatcacgtgtcaaccaaggacatttttatgcccttccacaaagccctcaaattacaaaacagctattgatgaatgcgggatttgatcgttattatcaaattgtcaaatgtttccgtgatgaggatttacgtggagaccgtcaacctgagtttacacaagttgacttagagacatcattccttagtgatcaagaaattcaagacattgttgagggtatgattgctaaagtaatgaaagacactaaaggtttagaggtttctttaccattcccaaggatggcatatgatgatgcaatgaataactacgggtctgataagcctgatacaaggtttgatatgcttttacaagacttgacagaaattgtcaaagaagttgacttcaaggtgttctcagaagcttcagtagttaaagcgattgttgtcaaagataaggcggacaagtactctcgaaaaaatattgataaattaacagaaattgcaaaacaatacggtgccaaaggtttagcatggctaaaatatgcagataatactatttcaggtccggttgctaagttcttgacagctattgaaggtaggttgacagaagctttacagctagagaataatgacttaattctatttgtagcagatagtcttgaagtagctaacgagactttaggagcgcttcgtacacgcattgcaaaagaacttgaactcattgattattctaaatttaatttcctatgggttgttgattggccaatgtttgagtggtcagaagaagagggacgatatatgtcggctcatcatccattcaccttgccaacagcggagacagcgcatgagttggaaggggatttggctaaagtacgtgcagttgcctatgatattgttttgaatggatatgagttaggcggtggtagcctacgtattaaccaaaaagatacacaagagcgtatgttcaaggctttaggatttagcgctgaatcagctcaggaacagtttggtttcttacttgaagctatggattacggcttcccaccacatggtggattggcaataggccttgaccgctttgttatgttgttagcaggcaaggacaatattcgagaagttattgcattccctaaaaacaataaggctagtgatccaatgactcaagctcctagtctcgtttcagaacaacaattagaagaattatcacttactgtagaaagttatgaaaac

SEQ ID NO: 10274 - protein, 583 aa, Streptococcus agalactiae
MKRSMYAGRVRSEHIGTSITLKGWVGRRRDLGGLIFIDLRDREGIMQLVINPEEVSASVMATAESLRSEFVIEVSGVVTAREQANDNLPTGEVELKVQELSILNTSKTTPFEIKDGIEANDDTRMRYRYLDLRRPEMLENFKLRAKVTHSIRNYLDNLEFIDVETPMLTKSTPEGARDYLVPSRVNQGHFYALPQSPQITKQLLMNAGFDRYYQIVKCFRDEDLRGDRQPEFTQVDLETSFLSDQEIQDIVEGMIAKVMKDTKGLEVSLPFPRMAYDDAMNNYGSDKPDTRFDMLLQDLTEIVKEVDFKVFSEASVVKAIVVKDKADKYSRKNIDKLTEIAKQYGAKGLAWLKYADNTISGPVAKFLTAIEGRLTEALQLENNDLILFVADSLEVANETLGALRTRIAKELELIDYSKFNFLWVVDWPMFEWSEEEGRYMSAHHPFTLPTAETAHELEGDLAKVRAVAYDIVLNGYELGGGSLRINQKDTQERMFKALGFSAESAQEQFGFLLEAMDYGFPPHGGLAIGLDRFVMLLAGKDNIREVIAFPKNNKASDPMTQAPSLVSEQQLEELSLTVESYEN

SEQ ID NO: 10275 - DNA, 1278 bp, Streptococcus agalactiae
atgaaacttcaaaaaccaaaagggactcaggatatcttacctggagaatcagcaaagtggcaatacgttgaaaatgttatacgcaatctctttaaacaatatcattatgatgaaattcgtacaccaatgtttgaacattacgaggttattagtcgctcagttggggatacaacggatatcgttacaaaagagatgtatgattttcatgataaaggagatcgtcacattacgcttcgtccagaaggaacagcacctgttgtacgttcttatgttgaaaataaactatttgcaccagaagttcaaaaaccaaccaaaatgtattatattggatcaatgttccgatatgagcgcccacaggctggtcgtttacgagaatttcatcaagtaggcgttgagtgctttggatcaaataatccagcaactgatgttgaaacaatcgcaatgggacatcatctatttgaagatttaggtatcaaaaacgttaaacttcatcttaatagtttagggaatccagaaagtcgtcaggcctatcgccaagctcttattgattacttaacacccatacgtgaacaattgtctaaggatagtcaacgtcgtttgaatgaaaatccattgcgcgtactagactctaaggagccagaagacaaactagcagttgaaaatgctccttctattttagattatttagatgagtcaagccaagcccactttgatgctgtgtgtcatatgcttgatgctctaaatattccatacatcattgatactaatatggttcgtggtcttgattattataatcatactatttttgagtttatcactgagattgaagataatgaattaacgatctgtgctggaggccgttatgacggcttagtatcctattttggtggaccagaaacaccagcatttggttttggattaggattagaacgcttgctcttaatattagataagcaagggatttctttaccaatagaaaatactatagatctgtatatagctgtattaggatcagaggctaatctagctgccttagatttggcacaatcaatacgtcatcagggttttaaagtagagcgtgattatttgggtcgtaaaatcaaagcacaatttaagtctgcagatacttttaatgctaaagtgattatgacattaggtagcagtgaagtagattcgaaagaggtcggtttaaaaaataatcaaacacgtcaagaagttaaagttagttttgaaaacattaaaacagatttttcatctgtgcttaaacaattaggattg

SEQ ID NO: 10276 - protein, 426 aa, Streptococcus agalactiae
MKLQKPKGTQDILPGESAKWQYVENVIRNLFKQYHYDEIRTPMFEHYEVISRSVGDTTDIVTKEMYDFHDKGDRHITLRPEGTAPVVRSYVENKLFAPEVQKPTKMYYIGSMFRYERPQAGRLREFHQVGVECFGSNNPATDVETIAMGHHLFEDLGIKNVKLHLNSLGNPESRQAYRQALIDYLTPIREQLSKDSQRRLNENPLRVLDSKEPEDKLAVENAPSILDYLDESSQAHFDAVCHMLDALNIPYIIDTNMVRGLDYYNHTIFEFITEIEDNELTICAGGRYDGLVSYFGGPETPAFGFGLGLERLLLILDKQGISLPIENTIDLYIAVLGSEANLAALDLAQSIRHQGFKVERDYLGRKIKAQFKSADTFNAKVIMTLGSSEVDSKEVGLKNNQTRQEVKVSFENIKTDFSSVLKQLGL

SEQ ID NO: 10277 - DNA, 519 bp, Streptococcus agalactiae
atgagaacatattcagataaaaacgaacttaaggaagaagtactaaaatcatataaaaaatatattgctgaattcaatgacattcctgagaagttgaaagatttaagaattgatgaggttgataggacaccagcggagaatctagcctatcaggttggctggactaccctgatactaaaatgggagtcagatgaacagagtggcttagaagttaaaacaccaactgagacgtttaaatggaatcaacttggagagctatatcagcattttactgagacctacgctagtctaaccatcaaagaacttacggctcaactcaatgataatgtagatgctataggtaacatgattgattcaatgagcgacgaagtcctatttaaacctcatatgagaaattgggctgatagtgcgactaagaatgcagtctgggaagtttataagtttattcatattaatacggtagctcctttcggaacatttagaactaagattcgcaagtggaaaaaagttgctttaaag

SEQ ID NO: 10278 - protein, 173 aa, Streptococcus agalactiae
MRTYSDKNELKEEVLKSYKKYIAEFNDIPEKLKDLRIDEVDRTPAENLAYQVGWTTLILKWESDEQSGLEVKTPTETFKWNQLGELYQHFTETYASLTIKELTAQLNDNVDAIGNMIDSMSDEVLFKPHMRNWADSATKNAVWEVYKFIHINTVAPFGTFRTKIRKWKKVALK

SEQ ID NO: 10279 - DNA, 1119 bp, Streptococcus agalactiae
atggataacaaattcaaaaatatcccaaaacggcatttaccacaaaaactcccatttgactacacgtcaatatatactgacccacaaatcattaaattaactactagggcaaatattgcaatcggtacttacgaaggatttctagagtctatcattaaccctatgctactaatctcccctttgcttagccaagaagccgttctctcttcaaaacttgaagggacccatgccaccttgaaagacttacttaattatgaagctggtaataaagtagatattgagcgtgatgaattgcatgaaatcattaactaccgaaaggctctcttttatgctctagaaaacatttccaccatcaacaacatcgattctaaaggattaccgttatccaatagaattattaaagaaatgcacaaaattcttctagataatgttagaggtagtagtaaaaatcctggtaattttaagagaagtcaaaactatatcggtagtgtatcctcgatttcatacactcctgtccccgcggaaaaaacaccagaatacatgtctaatttggagcaatatatccattatgatgacttagacttattggttcagtcagcaattatccatgctcaatttgaaatgattcacccttttgaagacggtaatggacgaattggacgattgcttataccactattcctgtactatcaggaactactttcttatccaacattttatatgagttcgtattttgaaagagataggtctctttacatatcacacctatcaaacatttcaaaagacaacaactggaaagactggtttgagtattacctagaaggagtgatattgtccgcagaagagagtacaaaaaaagctcaggacatactaagcctatataacattatgaaggaacaagtcatccctaaacttaattctgtttcaggtatccagcttcttgactttatattctcggctccaatctttaaggcagaacaagttagtgaacacctaaaaatttctaagagaactacctatactttactaaataagttaattgatgaaggttatctttcaacagataatgctcaaaggaatagaacctactattgtcctcaacttctttcaatcgttcaa

SEQ ID NO: 10280 - protein, 373 aa, Streptococcus agalactiae
MDNKFKNIPKRHLPQKLPFDYTSIYTDPQIIKLTTRANIAIGTYEGFLESIINPMLLISPLLSQEAVLSSKLEGTHATLKDLLNYEAGNKVDIERDELHEIINYRKALFYALENISTINNIDSKGLPLSNRIIKEMHKILLDNVRGSSKNPGNFKRSQNYIGSVSSISYTPVPAEKTPEYMSNLEQYIHYDDLDLLVQSAIIHAQFEMIHPFEDGNGRIGRLLIPLFLYYQELLSYPTFYMSSYFERDRSLYISHLSNISKDNNWKDWFEYYLEGVILSAEESTKKAQDILSLYNIMKEQVIPKLNSVSGIQLLDFIFSAPIFKAEQVSEHLKISKRTTYTLLNKLIDEGYLSTDNAQRNRTYYCPQLLSIVQ

SEQ ID NO: 10281 - DNA, 528 bp, Streptococcus agalactiae
atgtcttttgaacataagcatgaaggacacgataaacatcacgatcatagagaaaaatactcactaaaaacattaaagaatatctcgacaaaaatcgattataagactgccttagaaactgccaaaaaagaagctcgctcaggctttatttcacaaattgaattaaataccaaaggtgatacacctttttatgaaatcaaagttattgataataaaatagctaaaaaatataaaattgatgctaattctgggaagatcctttcaacaacatcagataatcaactcaattcaaaagatgcccaattaaaacaaccaagtaaagatattcagactgcattacaagctattcaagcaaaatataaaaatgcaaaaataaaagaaatttctcttgcgaataacaaatcaaataagctagtttataaagtaaaactacttgatggaaatactcctaagattgcccaatttgatagtgataaagcatcatttataaaggcaaataagcttaatacaactcataaaaatcacgac

SEQ ID NO: 10282 - protein, 176 aa, Streptococcus agalactiae
MSFEHKHEGHDKHHDHREKYSLKTLKNISTKIDYKTALETAKKEARSGFISQIELNTKGDTPFYEIKVIDNKIAKKYKIDANSGKILSTTSDNQLNSKDAQLKQPSKDIQTALQAIQAKYKNAKIKEISLANNKSNKLVYKVKLLDGNTPKIAQFDSDKASFIKANKLNTTHKNHD

SEQ ID NO: 10283 - DNA, 2538 bp, Streptococcus agalactiae
ttgaaaaagctaattgaaaaagtcaaatcactgacttctgtgattaaaattgtattttttatatctgttttagtgcttattattgttgaaatgattcatttgaaacgaactatttctgttgagcaactaaagagtgtttttgggcaattatctccaatgaatcttttcttaattatccttgtgggggttatcgctgtcttaccgacaaccggatatgactttgtactgaatggacttttacgtacagataaaagcaaaaggtatattttacagactagttggtgtatcaacacttttaataacttgtcaggattcggtggcttaatcgatattgggttgcgcatggctttttatggtaaaaaaggtcaagagaagagtgacctaagagaagtgactcgttttttaccctatcttatttctggtctgtcatttattagtgtgattgccttaatcatgagccatatttttcatgccaaagctagtgttgattactattatttggtattaattggtgctagtatgtattttcctgttatttattggatttctggtcataaaggaagccattatttcggagatatgccatctagtactcgtataaaattaggtgttgtttctttttttgaatggggatgtgcggccgcagcatttataattatcggttatttaatgggcattcatctaccagtttataaaattttaccactattttgtattggttgtgccgtcgggattgtatcccttattcccggtggattaggaagttttgaattagttctatttacagggtttgctgccgagggactacctaaagaaactgtggttgcatggttattactttatcgtttagcctactatattattccattctttgcaggtatctatttctttatccattatttaggtagtcaaataaatcaacgttatgaaaatgtcccgaaagagttagtatcaactgttctacaaaccatggtgagccatttgatgcgtattttaggtgcattcttaatattttcaacagcattttttgaaaatattacttatattatgtggttgcagaagctaggcttggacccattacaagaacaaatgttatggcagtttccaggtttattgctgggggtttgttttattctcttagctagaactattgatcaaaaagtgaaaaatgcttttccaattgctattatctggattactttgacattgttttatcttaatttaggtcatattagttggcgactatctttctggtttattttactattgttaggcttattagtcattaagccaactctctataaaaaacaatttatttatagctgggaagagcgtattaaggatggaatcattatcgttagtttaatgggagttctattttatattgcaggactactattccctatcagggctcatattacaggtggtagtattgaacgcctgcattatatcatagcatgggagccgatagcattggctacgttgattcttactctcgtttatttatgtttggttaagattttacaaggaaaatcttgtcagattggtgatgtgttcaatgtggatcgttataaaaaactacttcaagcttacggtggttcttcggatagcggtttagcctttttaaatgataaaaggctctactggtaccaaaaaaatggagaagattgcgttgcgttccaatttgtaattgtcaataataaatgtcttattatgggggaaccagccggtgatgacacttatattcgtgaagctattgaatcgtttattgatgatgctgataagctagactatgaccttgttttttacagtattggacagaagttgacactacttttacatgagtatggttttgactttatgaaagttggtgaggatgctttagttaatttagaaacgtttactcttaaagggaataagtacaaacctttcagaaatgccctaaatagagttgaaaaggatggtttctatttcgaagttgtacaatcgccacatagtcaagagctactaaatagtttggaagagatttctaatacttggttagaaggacgtcctgaaaaaggtttctcactaggatattttaataaagattatttccaacaagccccaatagctttggtaaaaaatgctgaacacgaagttgttgcttttgctaatattatgccaaactatgaaaagagtattatctctattgatttaatgcgtcacgataaacagaaaattccgaatggcgttatggatttcctctttttatcattattctcttattatcaagagaagggataccactattttgatttggggatggcacctttatcaggagttggtcgcgttgaaacaagttttgctaaagagagaatggcgtatcttgtctatcatttcggtagtcatttctactcatttaatggtttacacaagtataagaagaagtttacaccattgtggtcggaacgttatatttcttgttctcgttcgtcctggttaatttgtgctatttgtgccctattaatggaagatagtaaaattaagattgttaaa

SEQ ID NO: 10284 - protein, 846 aa, Streptococcus agalactiae
MKKLIEKVKSLTSVIKIVFFISVLVLIIVEMIHLKRTISVEQLKSVFGQLSPMNLFLIILVGVIAVLPTTGYDFVLNGLLRTDKSKRYILQTSWCINTFNNLSGFGGLIDIGLRMAFYGKKGQEKSDLREVTRFLPYLISGLSFISVIALIMSHIFHAKASVDYYYLVLIGASMYFPVIYWISGHKGSHYFGDMPSSTRIKLGVVSFFEWGCAAAAFIIIGYLMGIHLPVYKILPLFCIGCAVGIVSLIPGGLGSFELVLFTGFAAEGLPKETVVAWLLLYRLAYYIIPFFAGIYFFIHYLGSQINQRYENVPKELVSTVLQTMVSHLMRILGAFLIFSTAFFENITYIMWLQKLGLDPLQEQMLWQFPGLLLGVCFILLARTIDQKVKNAFPIAIIWITLTLFYLNLGHISWRLSFWFILLLLGLLVIKPTLYKKQFIYSWEERIKDGIIIVSLMGVLFYIAGLLFPIRAHITGGSIERLHYIIAWEPIALATLILTLVYLCLVKILQGKSCQIGDVFNVDRYKKLLQAYGGSSDSGLAFLNDKRLYWYQKNGEDCVAFQFVIVNNKCLIMGEPAGDDTYIREAIESFIDDADKLDYDLVFYSIGQKLTLLLHEYGFDFMKVGEDALVNLETFTLKGNKYKPFRNALNRVEKDGFYFEVVQSPHSQELLNSLEEISNTWLEGRPEKGFSLGYFNKDYFQQAPIALVKNAEHEVVAFANIMPNYEKSIISIDLMRHDKQKIPNGVMDFLFLSLFSYYQEKGYHYFDLGMAPLSGVGRVETSFAKERMAYLVYHFGSHFYSFNGLHKYKKKFTPLWSERYISCSRSSWLICAICALLMEDSKIKIVK

SEQ ID NO: 10285 - DNA, 741 bp, Streptococcus agalactiae
atgactgagaactggttacatactaaagatggttcagatatttattatcgtgtcgttggtcaaggtcaaccgattgtttttttacatggcaatagcttaagtagtcgctattttgataagcaaatagcatatttttctaagtattaccaagttattgttatggatagtagagggcatggcaaaagtcatgcaaagctaaataccattagtttcaggcaaatagcagttgacttaaaggatatcttagttcatttagagattgataaagttatattggtaggccatagcgatggtgccaatttagctttagtttttcaaacgatgtttccaggtatggttagagggcttttgcttaattcagggaacctgactattcatggtcagcgatggtgggatattcttttagtaaggattgcctataaattccttcactatttagggaaactctttccgtatatgaggcaaaaagctcaagttatttcgcttatgttggaggatttgaagattagtccagctgatttacagcatgtgtcaactcctgtaatggttttggttggaaataaggacataattaagttaaatcattctaagaaacttgcttcttattttccaaggggggagttttattctttagttggctttgggcatcacattattaagcaagattcccatgtttttaatattattgcaaaaaagtttatcaacgatacgttgaaaggagaaattgttgaaaaagctaat

SEQ ID NO: 10286 - protein, 247 aa, Streptococcus agalactiae
MTENWLHTKDGSDIYYRVVGQGQPIVFLHGNSLSSRYFDKQIAYFSKYYQVIVMDSRGHGKSHAKLNTISFRQIAVDLKDILVHLEIDKVILVGHSDGANLALVFQTMFPGMVRGLLLNSGNLTIHGQRWWDILLVRIAYKFLHYLGKLFPYMRQKAQVISLMLEDLKISPADLQHVSTPVMVLVGNKDIIKLNHSKKLASYFPRGEFYSLVGFGHHIIKQDSHVFNIIAKKFINDTLKGEIVEKAN

SEQ ID NO: 10287 - DNA, 2316 bp, Streptococcus agalactiae
atgttagacgaattaaaagcaatcataaaaagcccaaaattatggattacgatggctggggttgcactgattccaacgctatataatgttatctttctaagctcaatgtgggatccttatgggaatactaaaaatttacctgtggcagtcgttaaccaagataaatcggctaaattaaatggaaaaactatttcaattggcaaagatatggaggacaatttgtctaaaaatgatagcttagatttccattttacaacagctaaaagagcagaaaaagaattagaaaagggtcactattatatggttattacctttcctaaagatctttctagaaaagcgacaactctcatgacagaaaaaccagaaaggttaaatattacttataaaactactaaggggcgtagttttgtagcttcaaaaatgagtgagacagcagctaataaactaaaagatgaggtagcagaatctattacagggacttatactgaatcagtttttaaaaatatgggttctatgaaaacaggtatcaataaagctgctgatgggagtcaagaattattaaatggttctaataagctacaggatgggagccaaaccttgacaagtaatttagatgttttagcaagctctagtcaaactttttctggaggagctaataaactaaatagtggaataaacctttatacagatggtgtggggaccctatctaacgggttagaaacattatcagatggtgttactgcttacacaacaggtgtgcataagttgagtgaaggtagtcaaaaattagatgataagtctcaagcattggtggaaggatcagaaaagttgacggatggtttacaacaattgtcacaagcaactcaactaaaaccagagcaagaacgtactttgcagaacctttcagatggattaaagaatctaaatcagattattacaaatttacaatcgacagcaactactgatagcgatactaatagtaagttatttaattttttatcaactattgaatcaagtacaaaggctttgatgaatacggctgctgctgataaacaaaagcaaatgactgcggtacaatcaacgtcagcttttaaaagtttaacccctgaacaacaatctcaaatcacctcagcggttactggaacacctacttcagctgagacaattgcagcaaatatttcttcaaatatagaaaatatgaaaactgtgcttagtgaagcatctagttcagccccttctaataatggatcacaaaatcttcaaactttgtcaggaacagctaacaatttagtattaaaagctatctcagatttagataaaattcaaaaattgccaacggctactaagcagttatatcaaggtagtcaaaccttgacaaaaggaatcacggattatacgaatgctgtagggcaattacgcaaaggtgcagtaactttagatagtaaatccaatcaattgatttcaggaacacaaaaagcaagtcagggagctcaaactttagatagtaaatcggatcaattgagagacggagcggggcaattagctagtggttctgatagaattgcagatggttctaataagcttgctgggggaggacatcagttgacagatgggttgacagagttgtcaggtggtgtttctcaattatcaagttctttggggaaagctggggaccagttgtccatggtttctgtaaataaagataatgccaatgcagtatctagcccagtcactatcaagcatgaagattatgatagcgttgatacgaatggtgttggaatggcaccatacatgatttcagttgcgttgatggtggtagctttatcagccaatgttatttttgcgaaagctttatctggcaaagagccagctaatcgttttagttgggctaaaaataaattattaatcaatggattcattgcaactctagcagcaactatcttattttttgcagttcaattcataggtcttaaaccagattaccctggaaaaacctactttattatcctattgacagcatggactttgatggcattagtaactgctttagtgggatgggataataggtatggttccttcttgtcgttattaatattattattccagcttggttcaagcgcaggaacttacccaatagaattgagtcctaagttctttcaaacaattcaaccatttttaccgatgacttactctgtttcaggattaagagagaccatctcgttgacgggagacgttaaccatcaatggagaatgctagtaatctttttagtatcatcgatgatacttgctcttcttatttatcgtaaacaagaagat

SEQ ID NO: 10288 - protein, 772 aa, Streptococcus agalactiae
MLDELKAIIKSPKLWITMAGVALIPTLYNVIFLSSMWDPYGNTKNLPVAVVNQDKSAKLNGKTISIGKDMEDNLSKNDSLDFHFTTAKRAEKELEKGHYYMVITFPKDLSRKATTLMTEKPERLNITYKTTKGRSFVASKMSETAANKLKDEVAESITGTYTESVFKNMGSMKTGINKAADGSQELLNGSNKLQDGSQTLTSNLDVLASSSQTFSGGANKLNSGINLYTDGVGTLSNGLETLSDGVTAYTTGVHKLSEGSQKLDDKSQALVEGSEKLTDGLQQLSQATQLKPEQERTLQNLSDGLKNLNQIITNLQSTATTDSDTNSKLFNFLSTIESSTKALMNTAAADKQKQMTAVQSTSAFKSLTPEQQSQITSAVTGTPTSAETIAANISSNIENMKTVLSEASSSAPSNNGSQNLQTLSGTANNLVLKAISDLDKIQKLPTATKQLYQGSQTLTKGITDYTNAVGQLRKGAVTLDSKSNQLISGTQKASQGAQTLDSKSDQLRDGAGQLASGSDRIADGSNKLAGGGHQLTDGLTELSGGVSQLSSSLGKAGDQLSMVSVNKDNANAVSSPVTIKHEDYDSVDTNGVGMAPYMISVALMVVALSANVIFAKALSGKEPANRFSWAKNKLLINGFIATLAATILFFAVQFIGLKPDYPGKTYFIILLTAWTLMALVTALVGWDNRYGSFLSLLILLFQLGSSAGTYPIELSPKFFQTIQPFLPMTYSVSGLRETISLTGDVNHQWRMLVIFLVSSMILALLIYRKQED

SEQ ID NO: 10289 - DNA, 1686 bp, Streptococcus agalactiae
atgggtaaaaacattgataaaacctatatacaaatgaaaatgcttaatacaggtaaggggcctgctgtccgtgccttaagagcacaagctgataaagccctctatgcacaaacaatgaagcaaactgtagaaaagcaagaaaatcttaccttaagacaagctatgattgacgaaatacttgttgaagatggaaaggttgtgggggttcgtacagcaactaatcagaaattttcagcaaaatctgttgttataacaacaggtactgctcttcgaggagagattatattaggtgatcttaagtactcctcgggccctaataatagtttagcttctgtgacattggcagataatttaagagacctaggattagaaattggtcgtttcaaaactggaacacctcctcgtgtaaaagcctcctctattaattatgaaaagacagagatacaacctggggatgagcaaccaaatcatttttcatttatgtctagggatgaagattatattactgaccaggtaccgtgctggttgacctatacgaatactttgagtcatgacatcatcaatcaaaatctacaccgtgctcctatgttttctggaatcgttaagggagttggtcctagatattgtccgtcaattgaagataaaattgtgcgttttgctgataaagagcgccaccaactcttcttagaaccagaaggtagatacactgaagaagtttatgttcaagggctatcaacgagtcttcctgaggatgttcaagttgatttattacgttctataaaagggcttgaaaatgctgaaatgatgcgtacaggctatgctattgagtatgatattgtattgcctcatcaattaagagcaacactcgaaacaaaagtaattgctggtttgtttactgcaggacagactaatggtacttcaggttatgaagaagctgctggtcaagggttggttgctgggatcaacgctgctcttaaagttcaagggaagccagaacttattttaaaacgaagtgatgcttacattggtgtcatgattgatgatttagttaccaaagggactctagaaccatatcgtctgttgacaagtcgcgcagaatatcgtctgattcttcgtcatgataatgcagatatgcgtttaacagaaatcggttatgagattggcctagtagatgaagagcgttatgcgatatttaaaaagcgtcaaatgcaatttgaaaatgaattagaacgtttagactctataaagttaaagccagtttctgagacaaataaacggattcaagaattgggctttaaacctttgacagatgctttaactgccaaagaatttatgcgccgcccacaaatcacatatgcagtagcaacggattttgttggttgtgctgatgagccattagacagtaaggttattgaacttttggaaactgaaattaaatacgaaggctatattaaaaaggctttagatcaagttgcaaaaatgaaacgaatggaagaaaaacgtattccccctcatattgactgggacgacattgattctatcgcaacagaagctagacaaaaattcaaaaaaattaacccagaaacgctaggtcaggctagtcgtatttcaggagttaatccagccgatattagtattttaatggtttaccttgaaggaagacaaaaaggtcgtaaaaatatcaat

SEQ ID NO: 10290 - protein, 562 aa, Streptococcus agalactiae
MGKNIDKTYIQMKMLNTGKGPAVRALRAQADKALYAQTMKQTVEKQENLTLRQAMIDEILVEDGKVVGVRTATNQKFSAKSVVITTGTALRGEIILGDLKYSSGPNNSLASVTLADNLRDLGLEIGRFKTGTPPRVKASSINYEKTEIQPGDEQPNHFSFMSRDEDYITDQVPCWLTYTNTLSHDIINQNLHRAPMFSGIVKGVGPRYCPSIEDKIVRFADKERHQLFLEPEGRYTEEVYVQGLSTSLPEDVQVDLLRSIKGLENAEMMRTGYAIEYDIVLPHQLRATLETKVIAGLFTAGQTNGTSGYEEAAGQGLVAGINAALKVQGKPELILKRSDAYIGVMIDDLVTKGTLEPYRLLTSRAEYRLILRHDNADMRLTEIGYEIGLVDEERYAIFKKRQMQFENELERLDSIKLKPVSETNKRIQELGFKPLTDALTAKEFMRRPQITYAVATDFVGCADEPLDSKVIELLETEIKYEGYIKKALDQVAKMKRMEEKRIPPHIDWDDIDSIATEARQKFKKINPETLGQASRISGVNPADISILMVYLEGRQKGRKNIN

SEQ ID NO: 10291 - DNA, 1119 bp, Streptococcus agalactiae
atgactgataattcaaacattcgtgtcgttgtaggcatgagtggaggtgttgattcatcagtaactgccctgcttttaaaagagcaaggttatgatgttattggtgtttttatgaaaaattgggatgacacagatgaatttggtgtttgtacggctactgaagattataaagatgttgctgctgttgctgatcagatcggcataccatactactctgtcaactttgaaaaagagtattgggacagggttttcgaatattttttagcagaatatcgagcaggtcgtacgccaaatccagatgttatgtgtaataaggaaattaaatttaaagcatttctagattatgcgatgacattaggtgctgactatgtagcaacaggtcattatgcacaagtaacacgtgatgagaacggaatagttcatatgcttagaggagcagataataataaggatcaaacttattttctaagtcaattatctcaggagcaattgcaaaaaacgttatttccacttggtcatttacaaaaaccagaagttcgccgtatagctgaagaagcaggacttgcgaccgctaagaaaaaagactctactggtatttgttttattggagaaaaaaatttcaaggatttcctgggtcaatatttaccggctcaaccaggtcgtatgatgactgttgatggtcgtgacatgggtgaacatgctggtttaatgtattatactattggtcaaagagggggccttggtattggtgggcaacatggtggagataataaaccttggtttgtagttggaaaggatttaagtaaaaacattctttatgtaggtcaaggtttctatcatgactcattgatgtcaactagcttgacagcttctgaaatccactttacacgtgatatgcctaatgaatttaagctagaatgtacagctaagttcagatatcgtcaacctgacagtaaagttacagtttacgtaaaaggtaatcaagcaagggttgtgtttgatgatttacaacgagcaatcacaccaggtcaagctgttgttttttataatgaacaagaatgtttaggcggtgggatgattgatcaggcttatcgtgatgataaaatctgtcaatacatt

SEQ ID NO: 10292 - protein, 373 aa, Streptococcus agalactiae
MTDNSNIRVVVGMSGGVDSSVTALLLKEQGYDVIGVFMKNWDDTDEFGVCTATEDYKDVAAVADQIGIPYYSVNFEKEYWDRVFEYFLAEYRAGRTPNPDVMCNKEIKFKAFLDYAMTLGADYVATGHYAQVTRDENGIVHMLRGADNNKDQTYFLSQLSQEQLQKTLFPLGHLQKPEVRRIAEEAGLATAKKKDSTGICFIGEKNFKDFLGQYLPAQPGRMMTVDGRDMGEHAGLMYYTIGQRGGLGIGGQHGGDNKPWFVVGKDLSKNILYVGQGFYHDSLMSTSLTASEIHFTRDMPNEFKLECTAKFRYRQPDSKVTVYVKGNQARVVFDDLQRAITPGQAVVFYNEQECLGGGMIDQAYRDDKICQYI

SEQ ID NO: 10293 - DNA, 537 bp, Streptococcus agalactiae
atgaagaaagaaaatattccgaatctattaactgtagtcagaattttaatgattccgttatttatagtattaacttcagtaacaacaagtacaacttggcatattgttgcagctattgtatttgctattgcaagtttgaccgattacctagatggttatctagcacgtaaatggcaagtagtaacaaattttgggaaatttgcagacccattagctgataaaatgctagttatgagtgcttttatcatgttagttggactagacttagcaccagcttgggtttcagctattatcatttgtagagagttagcagttacaggtttgcgtttacttttagttgaaacaggtggaacagtacttgctgcagctatgccagggaaaataaagacggctactcaaatgtttgcagttatttttttgttagtacattggatgacacttggtaacatcatgttatacattgctctattctttaccttgtattcaggctacgactattttaaaggtgcaggcttcttatttaaggatacttttaaa

SEQ ID NO: 10294 - protein, 179 aa, Streptococcus agalactiae
MKKENIPNLLTVVRILMIPLFIVLTSVTTSTTWHIVAAIVFAIASLTDYLDGYLARKWQVVTNFGKFADPLADKMLVMSAFIMLVGLDLAPAWVSAIIICRELAVTGLRLLLVETGGTVLAAAMPGKIKTATQMFAVIFLLVHWMTLGNIMLYIALFFTLYSGYDYFKGAGFLFKDTFK

SEQ ID NO: 10295 - DNA, 1425 bp, Streptococcus agalactiae
atggaaaaagaaaaaaaattaggtcttttaccactaacaatgcttgtcattggctctcttatcggtggcggaatctttgatttaatgcaaaatatgagttccagagccggtttggtaccaatgcttattgcttgggtaattactgctatcgggatggggactttcgttttaagttttcaaaatttatctgaaaaaaggccggacctaacagctggaatctttagttacgctaaagaggggtttggaaactttatgggatttaactctgcatggggttattggttatcagcttggcttggaaatgttgcctacgctgcactcttattcagttcactcggttatttctttaaattctttggtaatggaaataatatcatctcaattattggagcaagtatagttatttgggttgtccatttcttaattttaagaggtgttaatacagctgcatttattaataccatagttacctttgcaaaattagtacctgttattattttcttaatttcagcgttattagctttcaaatttaacatttttagtcttgatatctggggaaatggattacatcaatcaattttcaaccaagtcaattcaactatgaaaaccgctgtttgggtatttattggtattgagggcgccgttgtcttctcaggtcgtgctaaaaaacactctgatattggtaaagcaagtatcctagcattattcactatgatttcactttatgtattgatttctgttttatcacttggtatcatgtcacgtccagaacttgcaaacttaaaaacaccagctatggcttacgttctagaaaaggctgttggtcactggggcgctatcttagttaaccttggtgttatcatttcagtatttggcgctattcttgcttggactttatttgcagcagaattaccatatcaagctgctaaagaaggtgcttttcctaaattctttgcaaaagaaaataaaaacaaagctccaatcaattcactcttagtcactaatctttgtgtacaagcattcttaatcacgttcttattcacacaaagtgcttatcgttttggtttcgcattagcatcatctgctatcttaattccttatgcttttacagcactatatcaattacaattcacactccgtgaggataagtcaactccaggacatcaaaagaatttaattatcggtatcctcgctacaatctatgctgtttaccttatctacgctggtggttttgattacttacttttgacaatgattgcttacactctaggtatgattctctatattaaaatgagaaaagatgacaagcttcctatctttgtgggatatgaaaaaattagtgccattgtcattctagcgctttgcttattatgtattattgaaattatgactggacaaattgacattgctgcaatcctagcaggt

SEQ ID NO: 10296 - protein, 475 aa, Streptococcus agalactiae
MEKEKKLGLLPLTMLVIGSLIGGGIFDLMQNMSSRAGLVPMLIAWVITAIGMGTFVLSFQNLSEKRPDLTAGIFSYAKEGFGNFMGFNSAWGYWLSAWLGNVAYAALLFSSLGYFFKFFGNGNNIISIIGASIVIWVVHFLILRGVNTAAFINTIVTFAKLVPVIIFLISALLAFKFNIFSLDIWGNGLHQSIFNQVNSTMKTAVWVFIGIEGAVVFSGRAKKHSDIGKASILALFTMISLYVLISVLSLGIMSRPELANLKTPAMAYVLEKAVGHWGAILVNLGVIISVFGAILAWTLFAAELPYQAAKEGAFPKFFAKENKNKAPINSLLVTNLCVQAFLITFLFTQSAYRFGFALASSAILIPYAFTALYQLQFTLREDKSTPGHQKNLIIGILATIYAVYLIYAGGFDYLLLTMIAYTLGMILYIKMRKDDKLPIFVGYEKISAIVILALCLLCIIEIMTGQIDIAAILAG

SEQ ID NO: 10297 - DNA, 1359 bp, Streptococcus agalactiae
atgacggaaaacgaacaactattttggaatagagtactagagctatctcgttctcaaatagcaccagcagcttatgaattttttgttctagaggctagactcctcaaaattgaacatcaaactgcagttattactttagataacattgaaatgaaaaagctattctgggaacaaaatttggggcctgttatcctaacagctggttttgaaattttcaatgctgaaattacagctaactatgtctcaaacgatttacatttacaagaaactagtttttctaactaccagcaatctagcaatgaagtaaatactttaccaattagaaaaatcgactctaaccttaaagagaaatatacttttgctaattttgttcaaggagatgaaaatagatgggctgtttcagcatcaattgctgtagctgatagtcctggcacgacttataatcctctatttatctgggggggacctggtctaggaaagacgcatctactaaatgctattggaaatcaagtcttaagagataatccaaacgcgagggttttatacatcactgctgagaattttattaatgaatttgtcagtcatattcgtttagattcgatggaagaattaaaagaaaagtttcgcaacttagacttactcctgattgatgatattcagtcgcttgctaagaaaaccttaggggggacccaagaggagttcttcaatactttcaatgctttacatacaaacgataaacaaatcgtattgaccagtgaccgaaatccaaatcaattaaatgatctagaagaacgtctagtcacgcgctttagttggggactcccagtaaatatcacaccacctgattttgaaacacgagttgctattttaaccaataaaattcaagaatatccttatgattttcctcaagataccattgaatacttagcaggagaatttgattccaacgtacgtgaattagaaggagccttgaaaaatattagtctagttgctgactttaagcatgctaaaactattacagtagatatagctgcagaagctatcagagcacgtaaaaatgatggtcctattgttactgtcattcctatagaagaaattcaaatacaagttggtaaattctatggcgtaactgtaaaagagataaaagcaactaaaagaacacaagatattgtccttgcaagacaggtagccatgtacttagctcgtgagatgacagataacagtctcccaaaaataggtaaagaatttgggggacgagatcactcaactgttctccacgcttataataaaataaaaaatatggttgctcaagatgacaacttacgaattgagatagaaactatcaaaaataaaatcaga

SEQ ID NO: 10298 - protein, 453 aa, Streptococcus agalactiae
MTENEQLFWNRVLELSRSQIAPAAYEFFVLEARLLKIEHQTAVITLDNIEMKKLFWEQNLGPVILTAGFEIFNAEITANYVSNDLHLQETSFSNYQQSSNEVNTLPIRKIDSNLKEKYTFANFVQGDENRWAVSASIAVADSPGTTYNPLFIWGGPGLGKTHLLNAIGNQVLRDNPNARVLYITAENFINEFVSHIRLDSMEELKEKFRNLDLLLIDDIQSLAKKTLGGTQEEFFNTFNALHTNDKQIVLTSDRNPNQLNDLEERLVTRFSWGLPVNITPPDFETRVAILTNKIQEYPYDFPQDTIEYLAGEFDSNVRELEGALKNISLVADFKHAKTITVDIAAEAIRARKNDGPIVTVIPIEEIQIQVGKFYGVTVKEIKATKRTQDIVLARQVAMYLAREMTDNSLPKIGKEFGGRDHSTVLHAYNKIKNMVAQDDNLRIEIETIKNKIR

SEQ ID NO: 10299 - DNA, 780 bp, Streptococcus agalactiae
gtgttctatacagaacagaaagatgatgaaaaaaaacaagtcattaatatactaaggtcttttaaagaaagtgatcatctaatgattataggaggagatggtaccttatcaaaagtaatgacttatctcccccaacatattccgtgcacttattatcctgttggttcgggaaatgattttgccagagctttgaaaattcctaacctcaaagaaacccttaccgctattcagacagaaagattaaaggaaattaattgctttatttatgataaagggctgattttgaatagtttagatttaggttttgcagcctatgtcgtttggaaagcatctaactctaaaataaaaaatattttgaatagatatcgtctaggaaaaataacttacattgttatagctatcaaatcattattacattcttctaaagtacaagtattagtggaaggagagacaggacagcagataaaactaaatgacctttattttttcgcattagcaaataacacttattttggaggtggcattactatttggcctaaagcaagtgctttaactgcagagttagatatggtttacgctaaagggcatacttttctaaaacgattaagtattttattatctttggtttttaaaaggcatactacctctaaaagtataaaacaccagactttcaaagctatgaccgtatattttcctaaaaatagtttgattgaaatagatggcgaaatagttgagttagatcagattagtttaaaatgtcaaaaaaggtatttatatatg

SEQ ID NO: 10300 - protein, 260 aa, Streptococcus agalactiae
MFYTEQKDDEKKQVINILRSFKESDHLMIIGGDGTLSKVMTYLPQHIPCTYYPVGSGNDFARALKIPNLKETLTAIQTERLKEINCFIYDKGLILNSLDLGFAAYVVWKASNSKIKNILNRYRLGKITYIVIAIKSLLHSSKVQVLVEGETGQQIKLNDLYFFALANNTYFGGGITIWPKASALTAELDMVYAKGHTFLKRLSILLSLVFKRHTTSKSIKHQTFKAMTVYFPKNSLIEIDGEIVELDQISLKCQKRYLYM

SEQ ID NO: 10301 - DNA, 573 bp, Streptococcus agalactiae
atggtaaaaatgattgttggattaggaaatccaggaagtaaatataatgatacaaaacataatattggatttatggctgttgacagaattgtaaaagaccttgacgtcaactttacagaagataaaaattttaaagcagagataggtagtgattttatcaacggtgaaaaaatttattttatcaaaccgactacttttatgaataacagtggtattgctgtaaaagccctgcttacttactacaacatttctattaaggatatgattatcatatatgatgatttagacatggaagtcggtaaaatacgttttcgtcaaaaaggatctgctgggggacataatggtatcaagtctattattgctcatttaggtactcaagaatttgatcgtattaaagtaggtataggacgtccgaatggacgtatgacagttattaatcatgttctagggaaatttgataaaaatgatgaaattatgatattaaatacccttgataaggttgacaatgctgtcaattattatttacagacgaatgattttcaaaaaacaatgcagaaatacaacggtttaaaa

SEQ ID NO: 10302 - protein, 191 aa, Streptococcus agalactiae
MVKMIVGLGNPGSKYNDTKHNIGFMAVDRIVKDLDVNFTEDKNFKAEIGSDFINGEKIYFIKPTTFMNNSGIAVKALLTYYNISIKDMIIIYDDLDMEVGKIRFRQKGSAGGHNGIKSIIAHLGTQEFDRIKVGIGRPNGRMTVINHVLGKFDKNDEIMILNTLDKVDNAVNYYLQTNDFQKTMQKYNGLK

SEQ ID NO: 10303 - DNA, 150 bp, Streptococcus agalactiae
ttggtaactgttgtcataacatatcctctaaataaaatttcctctgtcaagctttggataaagtatgcaagaaataaaaagaaaaaaggtccaaaagaaaaggaattgctggaagaaatttccacaaaacctgataaccagtggcaaata

SEQ ID NO: 10304 - protein, 50 aa, Streptococcus agalactiae
MVTVVITYPLNKISSVKLWIKYARNKKKKGPKEKELLEEISTKPDNQWQI

SEQ ID NO: 10305 - DNA, 114 bp, Streptococcus agalactiae
gtgactactttaacacttgccactctaggggctgctacagttcttaccggtgctactttagctactggagctggtgtttcagcggcaacagaagctggtgatactgttgttgac

SEQ ID NO: 10306 - protein, 38 aa, Streptococcus agalactiae
MTTLTLATLGAATVLTGATLATGAGVSAATEAGDTVVD

SEQ ID NO: 10307 - DNA, 183 bp, Streptococcus agalactiae
ttgttacgcctttttgttattgactgtgatgacgagcatatacctatttcctatggctgcccgctacgaaatgtctcttttagataccgtgaaaaagagctttataatggcatgtttaaacttgaaatggactggtgtattgatgtttttattaatcatgacttggtttattatggtgcagtc

SEQ ID NO: 10308 - protein, 61 aa, Streptococcus agalactiae
MLRLFVIDCDDEHIPISYGCPLRNVSFRYREKELYNGMFKLEMDWCIDVFINHDLVYYGAV

SEQ ID NO: 10309 - DNA, 435 bp, Streptococcus agalactiae
atgaagaaagtctgttttgtttgtcttggaaatatctgccgtagcccgatggctgagtttgttatggcgaatttagataaggaggatagcctcttggttgagagtcgtgcgacttcaacatgggagcatggaaatcctatacataggggaacgcaagcgattttgcagcgttatcaaattccttacattaacgataaagggtcacaacctatttctaaagacgatttagcatattttgattatatcatcggtatggatgagcaaaatgtcaaggatttaaaagctctatcacaaggaacctatgatgataagattagtcttttttgtgatggtggtgttcctgatccatggtatactggtgattttgaggaaacctatcgtctagtcaatgatggctgtaaacagtggttaacgctaataaataatagtagagat

SEQ ID NO: 10310 - protein, 145 aa, Streptococcus agalactiae
MKKVCFVCLGNICRSPMAEFVMANLDKEDSLLVESRATSTWEHGNPIHRGTQAILQRYQIPYINDKGSQPISKDDLAYFDYIIGMDEQNVKDLKALSQGTYDDKISLFCDGGVPDPWYTGDFEETYRLVNDGCKQWLTLINNSRD

SEQ ID NO: 10311 - DNA, 117 bp, Streptococcus agalactiae
atggggcttaacggtatggctcttatcgaaaagatcaaaagatcaaaagcaattgagggggactttgttccttatttccatgggaatttttggagtcagcttccttaccatgtttgt

SEQ ID NO: 10312 - protein, 39 aa, Streptococcus agalactiae
MGLNGMALIEKIKRSKAIEGDFVPYFHGNFWSQLPYHVC

SEQ ID NO: 10313 - DNA, 321 bp, Streptococcus agalactiae
ttgttgattggtgaagctgaacctttcgcacgtggacggaaacgtttcattgttggtccttcgttagcgaatgtttcagatactaccaagtttgctttttccaaaccaaagttgttttctgcatttgcaattgctgagttaagagttttctcaataacacgagctgctttgtttggagtgaattttaagattgcgattgcgtcagcaacattcttaccacggataagatcaagtactaaacgtgttttacgaggtgaaacacgcactgtacgagccattgctttagctgaagtaatttctgccattgtgtcctcctcctat

SEQ ID NO: 10314 - protein, 107 aa, Streptococcus agalactiae
MLIGEAEPFARGRKRFIVGPSLANVSDTTKFAFSKPKLFSAFAIAELRVFSITRAALFGVNFKIAIASATFLPRIRSSTKRVLRGETRTVRAIALAEVISAIVSSSY

SEQ ID NO: 10315 - DNA, 114 bp, Streptococcus agalactiae
atgaaggtaagaccatcggttaaaccaatttgcgaatactgtaaagttattcgtcgtaacggtcgtgttatggtaatttgtccgacaaacccaaaacacaaacaacgtcaagga

SEQ ID NO: 10316 - protein, 38 aa, Streptococcus agalactiae; identical to SEQ ID NO: 7244

SEQ ID NO: 10317 - DNA, 363 bp, Streptococcus agalactiae
atggctcgtattgctggagttgatattccaaatgacaaacgtgtagtaatttcacttacttatgtatacggaattggtctttctacatctaaaaaaatcttagcagctgcaggtatttctgaagatatccgcgttaaagatttgacaccagatcaagaggacgctatccgtcgtgaagttgatgcaatcaaagttgaaggtgacctacgtcgtgaggtaaacttgaatattaaacgtttgatggaaatcggttcataccgtggaatccgtcaccgtcgtggacttcctgtccgtggacaaaatactaaaaataacgctcgcactcgtaaaggtaaagctgttgcgattgcaggtaagaaaaaa

SEQ ID NO: 10318 - protein, 121 aa, Streptococcus agalactiae
MARIAGVDIPNDKRVVISLTYVYGIGLSTSKKILAAAGISEDIRVKDLTPDQEDAIRREVDAIKVEGDLRREVNLNIKRLMEIGSYRGIRHRRGLPVRGQNTKNNARTRKGKAVAIAGKKK

SEQ ID NO: 10319 - DNA, 120 bp, Streptococcus agalactiae
ttggatgacttgtgggtagcggagaaattccaaacgaacttggagatagctggttctctccgaaatagctttagggctagcgtcgatgttaagtctcttggaggtagagcactgtttggg

SEQ ID NO: 10320 - protein, 40 aa, Streptococcus agalactiae
MDDLWVAEKFQTNLEIAGSLRNSFRASVDVKSLGGRALFG

SEQ ID NO: 10321 - DNA, 93 bp, Streptococcus agalactiae
ttgactagagaagctggtattatttatcaatcatgtgttttgggttttacccgtaaactaactgttagattaacatttaatttaaggagtttt

SEQ ID NO: 10322 - protein, 31 aa, Streptococcus agalactiae
MTREAGIIYQSCVLGFTRKLTVRLTFNLRSF

SEQ ID NO: 10323 - DNA, 96 bp, Streptococcus agalactiae
gtgaacatagtatcacagctttatgacttgaatatgacctctaaaaataatgatattttatcattaaattatttaaaaaatagcttgacaattttt

SEQ ID NO: 10324 - protein, 32 aa, Streptococcus agalactiae
MNIVSQLYDLNMTSKNNDILSLNYLKNSLTIF

SEQ ID NO: 10325 - DNA, 96 bp, Streptococcus agalactiae
ttgcattatctaaaaggtttatccaaacttgcatcagcaagtcagagtttgagtaaacagtatatggttttgaatccagttgaaaatttatccttt

SEQ ID NO: 10326 - protein, 32 aa, Streptococcus agalactiae
MHYLKGLSKLASASQSLSKQYMVLNPVENLSF

SEQ ID NO: 10327 - DNA, 915 bp, Streptococcus agalactiae
atgacacgtaaaattggaattataggcatggggcacgttggatcaactgttgcacacgctcttattgcacaaggtattggtgatgattatgtctttattgatactaatgttgataaggttaatgctgatatgattgattttcaagatgctctggcaaatgctacttatcacgctaatctagtattaaacgactatgacgcgttgtcagatgctgatgttgtgatttcagccttaggtgatatttcactacagaataacaaagaagctaatcgctttgctgaactaccatttaccagtaaagaagtctacgacgttagccaaaagttaaaatcatctggttttagagggatccttattgtcgttactaatcctgttgatgccattacccagctttatcaagaatatactcaatttcctaaatcacgcgttatcggaacaggaaccttattggatactgctcggatgaaaagagtgcttggtcaacgcctacaagttgatccaaggagtatcggtggttataatctaggagagcatggtaactcccaatttgtcgcttggagtcaggtaactgtaaaaggacaaccagctatatcactattaaaagcagaagaattagaacagataaaagaagcttctttaaaaggcgggcacactgtcttttttggtaaaaaatatactagttatggtatcgctaccgcagctgtccgcatcgttttaactgtgttaaatgattcccatgagttactacctgtatctaccttctatgagtccgaaggggtttaccttggatatccagctattattggtagagtaggaattgtagaaagaatttctctttcactaagcccaaaagaagagcaacaactcacagattcagcggcatttattcgaaattatcttaagcatatcaatctt

SEQ ID NO: 10328 - protein, 305 aa, Streptococcus agalactiae
MTRKIGIIGMGHVGSTVAHALIAQGIGDDYVFIDTNVDKVNADMIDFQDALANATYHANLVLNDYDALSDADVVISALGDISLQNNKEANRFAELPFTSKEVYDVSQKLKSSGFRGILIVVTNPVDAITQLYQEYTQFPKSRVIGTGTLLDTARMKRVLGQRLQVDPRSIGGYNLGEHGNSQFVAWSQVTVKGQPAISLLKAEELEQIKEASLKGGHTVFFGKKYTSYGIATAAVRIVLTVLNDSHELLPVSTFYESEGVYLGYPAIIGRVGIVERISLSLSPKEEQQLTDSAAFIRNYLKHINL

SEQ ID NO: 10329 - DNA, 186 bp, Streptococcus agalactiae
atggctaaagtatgttatttcacaggacgtaaaacagtttctggtaacaaccgttcacacgcgatgaaccaaacaaaacgtactgttaaaccaaaccttcaaaaagttactgttcttatcgacggtaaaccaaaaaaagtttgggtttcagctcgtgcgcttaaatctggtaaagtagaacgcgtt

SEQ ID NO: 10330 - protein, 62 aa, Streptococcus agalactiae
MAKVCYFTGRKTVSGNNRSHAMNQTKRTVKPNLQKVTVLIDGKPKKVWVSARALKSGKVERV

SEQ ID NO: 10331 - DNA, 363 bp, Streptococcus agalactiae
atgactgtaaaaatcaatacaagagatggtcaaattgaactctctgatgacgttattgcaactgtcgttggaggttcagcaacggaaatttttggcgttgttggtatggcaagtaaaagtgctatcaaagataactttcaagcacttttgcgtaaggaaaactacgcaaaaggtgttgttgtgaggtctagtgaagcgggcatcgtagtagatgtttatactgtcatgagttacggcgtcaaaattagtgaagtttcaaaaaatattcaagagcgagtgaaattcaatctcgaaaatcagcttggtttatctgctgatatggtgaatgtttatgtgcaaagtattaaggttgtaggagaagat

SEQ ID NO: 10332 - protein, 121 aa, Streptococcus agalactiae
MTVKINTRDGQIELSDDVIATVVGGSATEIFGVVGMASKSAIKDNFQALLRKENYAKGVVVRSSEAGIVVDVYTVMSYGVKISEVSKNIQERVKFNLENQLGLSADMVNVYVQSIKVVGED

SEQ ID NO: 10333 - DNA, 93 bp, Streptococcus agalactiae
ttgtatgaatgttttaaaacaattctaacacaatttgtcaaaattttcaaaatactgatgctttatcatactaaaatagaaactctgataaaa

SEQ ID NO: 10334 - protein, 31 aa, Streptococcus agalactiae
MYECFKTILTQFVKIFKILMLYHTKIETLIK

SEQ ID NO: 10335 - DNA, 114 bp, Streptococcus agalactiae
atggctgaaaaaacagacctatcgtcagcctatcgcagacttaaaagtcctaacattaaaactagaaaacgtgctctgaaaatcattcatgagtacaaacgttacggtaaaaaa

SEQ ID NO: 10336 - protein, 38 aa, Streptococcus agalactiae; identical to SEQ ID NO: 7390

SEQ ID NO: 10337 - DNA, 288 bp, Streptococcus agalactiae
atgaaacttaaaatcagtgttttaacagcagcttcagctgtcactctattattagctactttagcaagtcttgcgaaggcagacacagtgtcttatccttcacgtgatgccggatttgtctactctcgtgggtatgcgccttctgaatcaagctatccttcacgcgatgccgggtttatctactctcgtgggtatgcgccttctgaatcaagctatccttcacgcgatgccggatttatctactctcgtgggtatgctccaaaacacttcctaagtgcttacgataaa

SEQ ID NO: 10338 - protein, 96 aa, Streptococcus agalactiae; identical to SEQ ID NO: 9020

SEQ ID NO: 10339 - DNA, 105 bp, Streptococcus agalactiae
gtgtctgccttcgcaagacttgctaaagtagctaataatagagtgacagctgaagctgctgttaaaacactgattttaagtttcattataaaatcctttcaaaga

SEQ ID NO: 10340 - protein, 35 aa, Streptococcus agalactiae
MSAFARLAKVANNRVTAEAAVKTLILSFIIKSFQR

SEQ ID NO: 10341 - DNA, 228 bp, Streptococcus agalactiae
atgaaaaataatgttgttacaacaaaggagagaaatattgctaaaccaccactacttggcattggtactttgttgattcttcgagcgttcggtttatcaaccgctcctaccttcaaagatataactcgaataataggagttagaatgattgataataaaaatgctccaatcaatacaaaaatatactcaattgtaaaaggtatcattttatcccatctcaatcatttg

SEQ ID NO: 10342 - protein, 76 aa, Streptococcus agalactiae
MKNNVVTTKERNIAKPPLLGIGTLLILRAFGLSTAPTFKDITRIIGVRMIDNKNAPINTKIYSIVKGIILSHLNHL

SEQ ID NO: 10343 - DNA, 132 bp, Streptococcus agalactiae
atgaacaatgttcctgagaacctagttactatgaccaaatatctaaatacaggatttagcgaaaataatcctgatggtatgttatactacgaaaatagattagatagttggttggcaaatcataaaaatttc

SEQ ID NO: 10344 - protein, 44 aa, Streptococcus agalactiae
MNNVPENLVTMTKYLNTGFSENNPDGMLYYENRLDSWLANHKNF

SEQ ID NO: 10345 - DNA, 135 bp, Streptococcus agalactiae
atgtcaaggatgtggactattgatttttgtccaccaatcgtttaccagcaatatgtttttatcattactattagtattagcattgcgatgtctatttttgctatttatcgctatgcttcattgaagaaaacgata

SEQ ID NO: 10346 - protein, 45 aa, Streptococcus agalactiae
MSRMWTIDFCPPIVYQQYVFIITISISIAMSIFAIYRYASLKKTI

SEQ ID NO: 10347 - DNA, 237 bp, Streptococcus agalactiae
atgaaagaaaaattattagtacctgctttaaattgtttgctaggtctactcttcctaggtgatcactggtttttatttcgtcttcaaaatggagaactttttgctattgtgacgctaatactgctttgcacaacttcatttttaatcaataagaatcaccccaaaaatttgactttaattgctatggttatcacttttttagccgtattatcttttctatctacctttttattagct

SEQ ID NO: 10348 - protein, 79 aa, Streptococcus agalactiae
MKEKLLVPALNCLLGLLFLGDHWFLFRLQNGELFAIVTLILLCTTSFLINKNHPKNLTLIAMVITFLAVLSFLSTFLLA

SEQ ID NO: 10349 - DNA, 96 bp, Streptococcus agalactiae
atgataaacgacaacaacaattggttttacaaagttatcaaaaatgtttttagacgatggtttttatcttatggcttgaaagtgtttttggaaagc

SEQ ID NO: 10350 - protein, 32 aa, Streptococcus agalactiae
MINDNNNWFYKVIKNVFRRWFLSYGLKVFLES

SEQ ID NO: 10351 - DNA, 117 bp, Streptococcus agalactiae
ttggaaaatgtttttgttgctggcgcatttgccctcataggaataactattttattgatgcttttactaggaaggttgatattgctacttatttttcaaggggagatgatgcaattt

SEQ ID NO: 10352 - protein, 39 aa, Streptococcus agalactiae
MENVFVAGAFALIGITILLMLLLGRLILLLIFQGEMMQF

SEQ ID NO: 10353 - DNA, 99 bp, Streptococcus agalactiae
atggagaagtttttccgaaacggtatcaaaaaaggtatcaaaagcaaaaaacgacaaaaaaagcaccttgcaagagacttgcaaaatgcttgtaatcgt

SEQ ID NO: 10354 - protein, 33 aa, Streptococcus agalactiae
MEKFFRNGIKKGIKSKKRQKKHLARDLQNACNR

SEQ ID NO: 10355 - DNA, 324 bp, Streptococcus agalactiae
atggactatgataacgacagctatcttatcccgaaagttttactgcaagatgatttctacagtagtctatctgcgagagatattttagtctatgctgtcttgaaagatagacagatagaagctcctgaaaaaggttggatagatactgatggcagtatatatctaaattttaaactgattgaattagctaaaatgttttcttgcagcagaacgacaatgatagatattatgcaacgactggaagaagttaatttgattgaacgagaaagagtagatgttttttatggctactctttaccctacaaaacctatatcaacgaggta

SEQ ID NO: 10356 - protein, 108 aa, Streptococcus agalactiae
MDYDNDSYLIPKVLLQDDFYSSLSARDILVYAVLKDRQIEAPEKGWIDTDGSIYLNFKLIELAKMFSCSRTTMIDIMQRLEEVNLIERERVDVFYGYSLPYKTYINEV

SEQ ID NO: 10357 - DNA, 123 bp, Streptococcus agalactiae
atgatattacaaataaaagaaaatgactatatatcagctcatatattggttaaagttggtaaatataaattattgaaattacctcataagtttaccaatgagattacggttagaaaggaatac

SEQ ID NO: 10358 - protein, 41 aa, Streptococcus agalactiae
MILQIKENDYISAHILVKVGKYKLLKLPHKFTNEITVRKEY

SEQ ID NO: 10359 - DNA, 111 bp, Streptococcus agalactiae
ttgcttcctcttaataggatattagctactggcctagaagtacatcatgatatttgtagaaattgtggtactattgctagaagttatataaatgacttggagaaattgaaa

SEQ ID NO: 10360 - protein, 37 aa, Streptococcus agalactiae
MLPLNRILATGLEVHHDICRNCGTIARSYINDLEKLK

SEQ ID NO: 10361 - DNA, 489 bp, Streptococcus agalactiae
atgtcaattttagatgactatgaaaaagaattactagttatttcacatcaaataatagcttaccttattaagtcaggtgttaatcctagtcaagcacaggatgttactcaagacgtctttttacaaatactagaatctgatttctcccttccacttgataaaataaaagcttggatgtatcgtactacaattaggaggtatattgatctttatcgaagaaataaacgctataacgaaatcctgcaaaaagaattctttatagaaaataatttgtattacaccgaatcagagaagttttttgaattacatgaagcaatattacacttgaagaaagattatcaaactttaatagatttatattattttaatgatttttcaattaaagaaatatctgaaattactggacaatcacaaagtacaattaaaataagacttatgcgagctagaagagaagttaaaaaatatttagaaaaggataattttaaaata

SEQ ID NO: 10362 - protein, 163 aa, Streptococcus agalactiae
MSILDDYEKELLVISHQIIAYLIKSGVNPSQAQDVTQDVFLQILESDFSLPLDKIKAWMYRTTIRRYIDLYRRNKRYNEILQKEFFIENNLYYTESEKFFELHEAILHLKKDYQTLIDLYYFNDFSIKEISEITGQSQSTIKIRLMRARREVKKYLEKDNFKI

SEQ ID NO: 10363 - DNA, 309 bp, Streptococcus agalactiae
atgattccatcgcaaatgctaaaaggattacttgaaggagctatcctaaaaatcatacagcaagaggagacttatgcttatgaaatctcaaaaaaattaaattcttatggttttggagaaatttccgaagggacaatctaccccattatcttaagactacaaagcaataaatatataaaaggacaacaaaagccttcccctcaaggacctaagcgtaaatattatacgttaaccaatgaaggcgtggagcaattagcccaatttaaacagaattgggagtcacttagtaaagcattaaacaaactactc

SEQ ID NO: 10364 - protein, 103 aa, Streptococcus agalactiae
MIPSQMLKGLLEGAILKIIQQEETYAYEISKKLNSYGFGEISEGTIYPIILRLQSNKYIKGQQKPSPQGPKRKYYTLTNEGVEQLAQFKQNWESLSKALNKLL

SEQ ID NO: 10365 - DNA, 261 bp, Streptococcus agalactiae
atgattgaattactattagcattactgttatggaatattttagtatttgcaacctatgctattgataaaaggcgtgcaattagaggggcatggcgtattagtgagaaaacattgatgatagagagtttattattagggggatttggtgcattcctaggtggagaagtttttcgtcataaaacgactaaatggtatttcagactagtttggtatatcggaatgattattgatttagctattatttggctaatttggtgttat

SEQ ID NO: 10366 - protein, 87 aa, Streptococcus agalactiae
MIELLLALLLWNILVFATYAIDKRRAIRGAWRISEKTLMIESLLLGGFGAFLGGEVFRHKTTKWYFRLVWYIGMIIDLAIIWLIWCY

SEQ ID NO: 10367 - DNA, 129 bp, Streptococcus agalactiae
ttggtcaatggtatggaatactgtagctgtcaatatcataatccttatcattgggttgctcatattatcaatttgccaatacttactgctaaaaaatttttggaagaagcttgtttagtaaaaaggttt

SEQ ID NO: 10368 - protein, 43 aa, Streptococcus agalactiae
MVNGMEYCSCQYHNPYHWVAHIINLPILTAKKFLEEACLVKRF

SEQ ID NO: 10369 - DNA, 246 bp, Streptococcus agalactiae
ttgacaatcgcttgttggatagagatgtttttagaaatagcaaaagtttatttacaaggtttagggcttgccagcataactgttattttagttggtataatttgggtcttttggcgtgccaagaaaaacatagataaaacagctagagaacgccaatctgttctttatgatgtccttctgatagctcttatgacagctccaatacttgcctttgcatttgtagctatcattttaatgataaaagct

SEQ ID NO: 10370 - protein, 82 aa, Streptococcus agalactiae
MTIACWIEMFLEIAKVYLQGLGLASITVILVGIIWVFWRAKKNIDKTARERQSVLYDVLLIALMTAPILAFAFVAIILMIKA

SEQ ID NO: 10371 - DNA, 120 bp, Streptococcus agalactiae
atgaaatatatgaggaatgatcgttttttcggatatgagaacgttttacgcttgatttttccatttaatttaggtattatttactttgatataaaggataggacttatattaaaacgatt

SEQ ID NO: 10372 - protein, 40 aa, Streptococcus agalactiae
MKYMRNDRFFGYENVLRLIFPFNLGIIYFDIKDRTYIKTI

SEQ ID NO: 10373 - DNA, 99 bp, Streptococcus agalactiae
ttgtcatattttgaaatgacaaaaatatctaaaaagtttacttctgattttttatactatgattatagtaaaggagaaccaaatggcaaaagatataat

SEQ ID NO: 10374 - protein, 33 aa, Streptococcus agalactiae
MSYFEMTKISKKFTSDFLYYDYSKGEPNGKRYN

SEQ ID NO: 10375 - DNA, 108 bp, Streptococcus agalactiae
atggcatctcgactggaaaaaaactatcacagccaatccttttctcgtgctattttaagtgcctccaaacgattattaactcctaatttatcaaaaatatttgacgtg

SEQ ID NO: 10376 - protein, 36 aa, Streptococcus agalactiae
MASRLEKNYHSQSFSRAILSASKRLLTPNLSKIFDV

SEQ ID NO: 10377 - DNA, 90 bp, Streptococcus agalactiae
atggacttgcgaaaactttcattctcaacctctttcttctttaaaaaattttatgttaaagatacagcctcaaaagttggcgttctctgt

SEQ ID NO: 10378 - protein, 30 aa, Streptococcus agalactiae
MDLRKLSFSTSFFFKKFYVKDTASKVGVLC

SEQ ID NO: 10379 - DNA, 150 bp, Streptococcus agalactiae
atgggtaaagataaatggactcataaacaaacgtctctgcaaaatctcttacaaaatattttactattagtgggtggagatgacagagataaactcccaaggttgaaggggctaatacaacaattattttctttaagaatcccgagggct

SEQ ID NO: 10380 - protein, 50 aa, Streptococcus agalactiae
MGKDKWTHKQTSLQNLLQNILLLVGGDDRDKLPRLKGLIQQLFSLRIPRA

SEQ ID NO: 10381 - DNA, 255 bp, Streptococcus agalactiae
ttgtcattctctctatctttgatatactttattaactattataacaaaataagaaagggaaggtctattcttatggataattgtactttagaattcccttatagttttgaaaataactttaaacctattttgtccgcttttacatctaatgaaatgccaagctaccccatgctcccattatgtttacaaaaagcacctccatcactcatcggacaaaaaaagacacctcaaaaaggtgtctttttagtatcaata

SEQ ID NO: 10382 - protein, 85 aa, Streptococcus agalactiae
MSFSLSLIYFINYYNKIRKGRSILMDNCTLEFPYSFENNFKPILSAFTSNEMPSYPMLPLCLQKAPPSLIGQKKTPQKGVFLVSI

SEQ ID NO: 10383 - DNA, 537 bp, Streptococcus agalactiae
atgtttcacacaaaaagcctaatccagatggctatgatggctactttattggtggtacttggtttcattcctgctctaccacttggtttcattccggtccctatcgtcttacaaaacctaggggttatgatggctggtgttattttgggcggaagaaaagggagtttatctattttgctcttctttcttgtcggtttagttattcctgtattctcaggtttacgttcgactatacctgtattgacaggaccaacagctggttatgttattgcttggttgtttgttcctttgcttatctcatatggtgtaaaattagtaaataaaaagaattttatagctattttccttattgtatggctagcaggggtcctttttgtagatgtagcaggagcagtttggctggcatcttatacgaacatcccattagataaatcacttcttcaaaacttagtatttatcccaggagatacaataaaagccattatagctgctgttgttgctgttaaatataaagatagttttttcttgactgaaaaa

SEQ ID NO: 10384 - protein, 179 aa, Streptococcus agalactiae
MFHTKSLIQMAMMATLLVVLGFIPALPLGFIPVPIVLQNLGVMMAGVILGGRKGSLSILLFFLVGLVIPVFSGLRSTIPVLTGPTAGYVIAWLFVPLLISYGVKLVNKKNFIAIFLIVWLAGVLFVDVAGAVWLASYTNIPLDKSLLQNLVFIPGDTIKAIIAAVVAVKYKDSFFLTEK

SEQ ID NO: 10385 - DNA, 774 bp, Streptococcus agalactiae
atgaaattaacaacgttaggttgttggggtggttatccttataaagatggaggaaccacaagttttctattaactggagaaaataattttcacttattaatagatgcgggaagtcgttcaatcaatgagctagaaaaagaaataagcccgttggatttggatgcagttatcatcagtcattatcatccagatcatgtagcagatttgggtgtgttgtatcattatcgtttgctataccctaaagataaatgggaacccaaagtattgccagtttatggacataatgaggatgattatgagttttctaaattgacattacctaacgttgctcaaggaattgcttatcataccaatggagttgagcaagttggtcccttcaatattacgtttatcaaaacagtccacccagtcgtctgctatgccatgaggattacagaaagagaaactggtcaagtattagtctttacaggagattctgggtattttgctgaccttgtaccttttacaaaaggcgcagatttatttttagcagacgtttatctttacgagggaaatgaaaatcatattgcacatttgactagtaaagaagcaggtgagattgcttataacgctaaagttaagaaattagttttaacacatgttccgcagtttccgggagaaggaataaaccccgaaaatcatttggaagaacttcgactacagtctgaaaagtatgcaggtggcatctctgttgatttagctcagccacataaatcttgggacttaggaaaacta

SEQ ID NO: 10386 - protein, 258 aa, Streptococcus agalactiae
MKLTTLGCWGGYPYKDGGTTSFLLTGENNFHLLIDAGSRSINELEKEISPLDLDAVIISHYHPDHVADLGVLYHYRLLYPKDKWEPKVLPVYGHNEDDYEFSKLTLPNVAQGIAYHTNGVEQVGPFNITFIKTVHPVVCYAMRITERETGQVLVFTGDSGYFADLVPFTKGADLFLADVYLYEGNENHIAHLTSKEAGEIAYNAKVKKLVLTHVPQFPGEGINPENHLEELRLQSEKYAGGISVDLAQPHKSWDLGKL

SEQ ID NO: 10387 - DNA, 504 bp, Streptococcus agalactiae
atgcagaaatttacccaagaagaaaaagaatggtttatgacagaagctctaaaggaggcaaaatcctccttagagaaagaagaaattcctataggttgtgtcattgtaaaagatggtcatattattggaagaggacataatgctcgtgaagagtttaataaagctattttacatgctgaaatcatggctattaacaatgcaaatgagaaggtagggaattggcgcttattagatactactttatttgttactgtagaaccttgtgtaatgtgtagtggagctattggcttagctagaattccccacgttatatatggcgctaagaatacgaaatttggagcagcgggaagtctctatgatattttaagtgatagccgacttaatcatagagttgaggttgaaaccggcattttagaagatcaatgcgctaaaataatgcaggatttctttcgaaaaggacgacaacgcaagaaagaagctaaactaagtgaaaaaactaagatt

SEQ ID NO: 10388 - protein, 168 aa, Streptococcus agalactiae
MQKFTQEEKEWFMTEALKEAKSSLEKEEIPIGCVIVKDGHIIGRGHNAREEFNKAILHAEIMAINNANEKVGNWRLLDTTLFVTVEPCVMCSGAIGLARIPHVIYGAKNTKFGAAGSLYDILSDSRLNHRVEVETGILEDQCAKIMQDFFRKGRQRKKEAKLSEKTKI

SEQ ID NO: 10389 - DNA, 102 bp, Streptococcus agalactiae
gtgggtcaggggaggaatccagcagccctaagcgatgctaaatgtgtgctctttttattttcaaaagtcaaagtgtttttggaaataattatgaaagtttca

SEQ ID NO: 10390 - protein, 34 aa, Streptococcus agalactiae
MGQGRNPAALSDAKCVLFLFSKVKVFLEIIMKVS

SEQ ID NO: 10391 - DNA, 132 bp, Streptococcus agalactiae
atgtgtgctctttttattttcaaaagtcaaagtgtttttggaaataattatgaaagtttcataaaaattggtagcgtttcaaaaaatatgaaaatacagttaaaaaaccttgaaaaaaaactcacaaaagag

SEQ ID NO: 10392 - protein, 44 aa, Streptococcus agalactiae
MCALFIFKSQSVFGNNYESFIKIGSVSKNMKIQLKNLEKKLTKE

SEQ ID NO: 10393 - DNA, 459 bp, Streptococcus agalactiae
atgataataaattcattcgataatagtagaaaagcgattattaatcctgaagatattaattcaccaataaaaggttttccaaagactgttattacctgtttcgcgcgggagactttcaatcgtattttagaagaattgcctcatcgtgaaattgctagaactagtgtagcaaacttagaaattcccatttatgaattagaatttaaaggacaaaagattggctttttcaatgcttatgttggtgcttcagcttgcgtagcaatcttggaagatattatagtatttggaatggaaagtttaattgtttttggaacatgtggcgtccttgattcgtcaattgaggagacatccattattattccaagaagtgctattagggatgaagggacatcatttcattattcggaagcaagttctgaaattgcagtaaacacaaattcaatttttttactctgcgga

SEQ ID NO: 10394 - protein, 153 aa, Streptococcus agalactiae
MIINSFDNSRKAIINPEDINSPIKGFPKTVITCFARETFNRILEELPHREIARTSVANLEIPIYELEFKGQKIGFFNAYVGASACVAILEDIIVFGMESLIVFGTCGVLDSSIEETSIIIPRSAIRDEGTSFHYSEASSEIAVNTNSIFLLCG

SEQ ID NO: 10395 - DNA, 387 bp, Streptococcus agalactiae
atgcatatcaaagaagttagtaaaaagactggcattacgtcagataccatcaggtattatgagagaattaatcttattccccctattcatcggagtgaatcaggaattcgtgagttcacacaaaacgatattgatattttagaatttgtccgctattttagaggcgcaggtgtttccgttgaaagtctcattgattatattcatttggttgaaaaaggcgattccactatcccagctaggctagaaattttaaaagatgaacgcgacaatcttgaagataggcttcaaggcctccaagaagcacttaatcgtctaaatcacaaaatagacaattatcaaaataaagttgttcctagagaacaagaactttttgatccaacaacgaaa

SEQ ID NO: 10396 - protein, 129 aa, Streptococcus agalactiae
MHIKEVSKKTGITSDTIRYYERINLIPPIHRSESGIREFTQNDIDILEFVRYFRGAGVSVESLIDYIHLVEKGDSTIPARLEILKDERDNLEDRLQGLQEALNRLNHKIDNYQNKVVPREQELFDPTTK

SEQ ID NO: 10397 - DNA, 186 bp, Streptococcus agalactiae
atgagtgatattgaggtatattctgtattagtttctcgtattgaatattctgatggtacaggttcaaaggttcgtcctgctgtagtagtcaaatttaatgatgaagtaataaaaactttaagatttactactaaatatgaaaataagtctgacaatataagaagtcagtatttagaagttattgat

SEQ ID NO: 10398 - protein, 62 aa, Streptococcus agalactiae
MSDIEVYSVLVSRIEYSDGTGSKVRPAVVVKFNDEVIKTLRFTTKYENKSDNIRSQYLEVID

SEQ ID NO: 10399 - DNA, 267 bp, Streptococcus agalactiae
ttgaagaatatcttcgatatgtataaatactatttctttcaaaatcaatatcatcccaagttactctataaaattgtttacgaaaataaactattcaaagaaataaccattgatttagaaatttcaaaggaatgtttagaaatacgacttttccatctacttaaagattattccaatttgaacaataaagaaataagtacgatcgttagtaactttcaaagaaataaaaatcaaaccatgaatttagctctttatgatatcataaca

SEQ ID NO: 10400 - protein, 89 aa, Streptococcus agalactiae
MKNIFDMYKYYFFQNQYHPKLLYKIVYENKLFKEITIDLEISKECLEIRLFHLLKDYSNLNNKEISTIVSNFQRNKNQTMNLALYDIIT

SEQ ID NO: 10401 - DNA, 213 bp, Streptococcus agalactiae
atgttaacgatgcttaacaattcagctaaggagaaagccataaaagagtacttacgtgtcctaaaacctggtggacgtttactcacacatgatgtttcttatcaagatgaagacactgccaagctgatcgatcaacttagacatactatgaatgttaacgttgctcctctaaaaatagatgattggcaaaatttattcttacaaaatggtttt

SEQ ID NO: 10402 - protein, 71 aa, Streptococcus agalactiae
MLTMLNNSAKEKAIKEYLRVLKPGGRLLTHDVSYQDEDTAKLIDQLRHTMNVNVAPLKIDDWQNLFLQNGF

SEQ ID NO: 10403 - DNA, 201 bp, Streptococcus agalactiae
atggtgtcagcgctacttaagtttgattttagcgttgtaaggcataatatggctattaaagttaataatagttttttaatcattatgggaacctcgtttctcttactgctagcttatcatatcaaaaaagaaggaaaagagatactatcttctctgtttgttataagcaattttttgataactctaccttattttttgtta

SEQ ID NO: 10404 - protein, 67 aa, Streptococcus agalactiae
MVSALLKFDFSVVRHNMAIKVNNSFLIIMGTSFLLLLAYHIKKEGKEILSSLFVISNFLITLPYFLL

SEQ ID NO: 10405 - DNA, 288 bp, Streptococcus agalactiae
atggattacaagttagtgatgattattctcatcttagtcatattgatttatttgttgttgcgccttcactatttagaagagttgctaaaacattatcacttcaaaaatgatgaaggagtttgttcattatcaagaacaaaaaatccattgtatctattaatggcaatgattacttttttgccaaatcttatcaattggatagctaatggttttgaggcaatagacattgttcgcctgattcctgtggtagtctttttatggttgtattattgtggagatgacgacgaa

SEQ ID NO: 10406 - protein, 96 aa, Streptococcus agalactiae
MDYKLVMIILILVILIYLLLRLHYLEELLKHYHFKNDEGVCSLSRTKNPLYLLMAMITFLPNLINWIANGFEAIDIVRLIPVVVFLWLYYCGDDDE

SEQ ID NO: 10407 - DNA, 93 bp, Streptococcus agalactiae
atgctaaaaaaatcagaccacgaagtgaagctcctccacaatagtttagcatcagctgtagtcccagaagaaagaacaccaaaatcagctagt

SEQ ID NO: 10408 - protein, 31 aa, Streptococcus agalactiae
MLKKSDHEVKLLHNSLASAVVPEERTPKSAS

SEQ ID NO: 10409 - DNA, 90 bp, Streptococcus agalactiae
ttgaataaacagtttgctattggaagtgaccgaaaaataagcattctgaatgctaaaaaaatcagaccacgaagtgaagctcctccacaa

SEQ ID NO: 10410 - protein, 30 aa, Streptococcus agalactiae
MNKQFAIGSDRKISILNAKKIRPRSEAPPQ

SEQ ID NO: 10411 - DNA, 387 bp, Streptococcus agalactiae
atgtctaccatctattttatttctttatgcatgagttttatcttaagttattatgatataaaataccaagagtatcctatttttctatggatattattcaccatttcaacgataattctcacaccgattacaaaagtttctattgttttgtgtttatttgggattttagctgaagtggttgatattaatatcggaagtggagatttcctttatttagccacaattggcttatctttacctcttcatcaaatgctttttattattcaaataggtgcttggttaggaattatttattgtttagttatgagaaaaatgaaaaaaacgatagcttttctaccgtttttaagtatcgcttatataatcgtcaccagttactctcttttattc

SEQ ID NO: 10412 - protein, 129 aa, Streptococcus agalactiae
MSTIYFISLCMSFILSYYDIKYQEYPIFLWILFTISTIILTPITKVSIVLCLFGILAEVVDINIGSGDFLYLATIGLSLPLHQMLFIIQIGAWLGIIYCLVMRKMKKTIAFLPFLSIAYIIVTSYSLLF

SEQ ID NO: 10413 - DNA, 243 bp, Streptococcus agalactiae
atgttttacttaattgttgcccttttgattgccttgtattacttttttatggcaccaaaaacagtacgtaatactttgaacgctattggtttagtaggtttggtagccttattacttgtcttggcagttatgagttttattaaaatccttcaattgccaggtgaattgtatattgggcttataatgattcctctaggatatacagcatttaaagaaacattgaatttgtcagaaaagaagaaa

SEQ ID NO: 10414 - protein, 81 aa, Streptococcus agalactiae
MFYLIVALLIALYYFFMAPKTVRNTLNAIGLVGLVALLLVLAVMSFIKILQLPGELYIGLIMIPLGYTAFKETLNLSEKKK

SEQ ID NO: 10415 - DNA, 252 bp, Streptococcus agalactiae
atgatattagtactattaatattattaaaaacaattagggtctattcttatatcttactagcctatgccttgttatcttggtttccaggagcatacgattcatggattggtagactagtggtacagattgttgatccgattattcgcccactcagaagatttaatctacaatttttaggtctagattttacagtaatagtagcattctttttactaaatatgttgagtagatttttaatcttgctttttaca

SEQ ID NO: 10416 - protein, 84 aa, Streptococcus agalactiae
MILVLLILLKTIRVYSYILLAYALLSWFPGAYDSWIGRLVVQIVDPIIRPLRRFNLQFLGLDFTVIVAFFLLNMLSRFLILLFT

SEQ ID NO: 10417 - DNA, 102 bp, Streptococcus agalactiae
atgactactgagaaaaatcgttatttgcggattttagacgataaaatcgttaaaaagttagtaaaaatgttgcttttcatgttgctttggtcacttttgtgt

SEQ ID NO: 10418 - protein, 34 aa, Streptococcus agalactiae
MTTEKNRYLRILDDKIVKKLVKMLLFMLLWSLLC

SEQ ID NO: 10419 - DNA, 228 bp, Streptococcus agalactiae
atggaatcacatttagtgagaatcatcaatcgcctcgaattaatggcgactgatggtggtaatttaaaacgtaattttgaacgtgaaggtgttgttgtagcagaagtatcttttagtaatgaccctgaaaacggtcctgttttcacattacgtgatgtagaagcgcgtgaatcatattcatttgacagcattgaccttatcgcaatggaaatttacgatttattatac

SEQ ID NO: 10420 - protein, 76 aa, Streptococcus agalactiae
MESHLVRIINRLELMATDGGNLKRNFEREGVVVAEVSFSNDPENGPVFTLRDVEARESYSFDSIDLIAMEIYDLLY

SEQ ID NO: 10421 - DNA, 195 bp, Streptococcus agalactiae
atgtcagaaaaagctatactattaattatccttattgcttttgttattatcgctattataaagatagctctgttaaagttatatatgaatacgataaaacctaaagtagataatgaaggaaacatcataacaaagcctgtaaaggatgatttaacacccgaggaacgtgaagaacgtgaatttgataaagattgg

SEQ ID NO: 10422 - protein, 65 aa, Streptococcus agalactiae
MSEKAILLIILIAFVIIAIIKIALLKLYMNTIKPKVDNEGNIITKPVKDDLTPEEREEREFDKDW

SEQ ID NO: 10423 - DNA, 114 bp, Streptococcus agalactiae
gtgactgaaaatatgattgaatttagaaaactaaattcattttttcgtgtgatcttggtaactgccaagatcttttttattgccatgactattgttaatagtttcataaaagca

SEQ ID NO: 10424 - protein, 38 aa, Streptococcus agalactiae
MTENMIEFRKLNSFFRVILVTAKIFFIAMTIVNSFIKA

SEQ ID NO: 10425 - DNA, 180 bp, Streptococcus agalactiae
ttgggaaaaagggtaaaaacaactggcattgcacaaattgtggaagaacgtttaagacaaaataaaaaagccccacgctcaaattttgtccaaggagagcgtgaggcaaattctagtatagtaaaaacctgctttttgggaggggtttttaccatacctattttaacagaaaatgaggta

SEQ ID NO: 10426 - protein, 60 aa, Streptococcus agalactiae
MGKRVKTTGIAQIVEERLRQNKKAPRSNFVQGEREANSSIVKTCFLGGVFTIPILTENEV

SEQ ID NO: 10427 - DNA, 195 bp, Streptococcus agalactiae
ttgttttatacctcattttctgttaaaataggtatggtaaaaacccctcccaaaaagcaggtttttactatactagaatttgcctcacgctctccttggacaaaatttgagcgtggggcttttttattttgtcttaaacgttcttccacaatttgtgcaatgccagttgtttttaccctttttcccaaccaaacc

SEQ ID NO: 10428 - protein, 65 aa, Streptococcus agalactiae
MFYTSFSVKIGMVKTPPKKQVFTILEFASRSPWTKFERGAFLFCLKRSSTICAMPVVFTLFPNQT

SEQ ID NO: 10429 - DNA, 141 bp, Streptococcus agalactiae
atgagaccaaaacaatatccgtatagcggaaataaaaaagaatctattgcggtaacagtagattccaaaacgctagccgagaaactagagattactgaccaatcgaatatttcccaagcgaaacaccgattatttggtctg

SEQ ID NO: 10430 - protein, 47 aa, Streptococcus agalactiae
MRPKQYPYSGNKKESIAVTVDSKTLAEKLEITDQSNISQAKHRLFGL

SEQ ID NO: 10431 - DNA, 99 bp, Streptococcus agalactiae
ttgatttcatcttcacatcaagaattcaaaatgccgtttgtctacttgtttacagaccaaataatcggtgtttcgcttgggaaatattcgattggtcag

SEQ ID NO: 10432 - protein, 33 aa, Streptococcus agalactiae
MISSSHQEFKMPFVYLFTDQIIGVSLGKYSIGQ

SEQ ID NO: 10433 - DNA, 129 bp, Streptococcus agalactiae
atgttaattaataaaaatttagtaagagacattagacttgctatcaatgaatacgatgataattatgacgaagataacgcagaagtttgtatagaagtcattagacgattgattgaacaggaggaattc

SEQ ID NO: 10434 - protein, 43 aa, Streptococcus agalactiae
MLINKNLVRDIRLAINEYDDNYDEDNAEVCIEVIRRLIEQEEF

SEQ ID NO: 10435 - DNA, 129 bp, Streptococcus agalactiae
atgaatattgaagacattgaacgtattatttcagaatatctaatttttaggtctgacattgatggttgtgcagtaattgacattgaagattttttaaagcatattcgtttttcgtatgagcgactaaaa

SEQ ID NO: 10436 - protein, 43 aa, Streptococcus agalactiae
MNIEDIERIISEYLIFRSDIDGCAVIDIEDFLKHIRFSYERLK

SEQ ID NO: 10437 - DNA, 213 bp, Streptococcus agalactiae
atgatttatagagacaaaaacacaggagcagtagtcgttactgactgtgcgctgttaggcgactgggagattgttcctaacacagtagataagacaccgacaagtgatgaaaaatcttggaccgttcaaactctgaaagaacatttgacagggctaggaattgagtataactcgtctgctacaaaatctgagttattagaattactccctaaa

SEQ ID NO: 10438 - protein, 71 aa, Streptococcus agalactiae
MIYRDKNTGAVVVTDCALLGDWEIVPNTVDKTPTSDEKSWTVQTLKEHLTGLGIEYNSSATKSELLELLPK

SEQ ID NO: 10439 - DNA, 333 bp, Streptococcus agalactiae
ttgattgaagtaattatcaaaaaatatttagacgagcatttagatgtgccgtctttttttgaacatcaaaaagatgaacctgcacgattcatcattttagaaaagactagcggggctaagcaaaatcatttgctaagttccacgtttgcttttcaaagttatgccgaatcgttgtatgaggcggctttacttaatgacaaagtaaagcaagtaattgagcagcttgatgtcttgccacaagtttctggtgtacatcttaacgctgactacaattttacagatacagcaactaagcgctatcgctatcaagctgtatttgacattaatcattat

SEQ ID NO: 10440 - protein, 111 aa, Streptococcus agalactiae
MIEVIIKKYLDEHLDVPSFFEHQKDEPARFIILEKTSGAKQNHLLSSTFAFQSYAESLYEAALLNDKVKQVIEQLDVLPQVSGVHLNADYNFTDTATKRYRYQAVFDINHY

SEQ ID NO: 10441 - DNA, 234 bp, Streptococcus agalactiae
ttgacaacatctactgcctcttcaacagcatctttagcatcatctgctagttctttacctttagcaattgttttttcgacaaaaccttttgcctctaactctttatcgccagttagcttaccagctccttcttttaggctacctgatgcttgttcaacttttgattttagtttttcttgtgacataatgtgtctccttattatttttattaattataacatctatatctttctt

SEQ ID NO: 10442 - protein, 78 aa, Streptococcus agalactiae
MTTSTASSTASLASSASSLPLAIVFSTKPFASNSLSPVSLPAPSFRLPDACSTFDFSFSCDIMCLLIIFINYNIYIFL

SEQ ID NO: 10443 - DNA, 198 bp, Streptococcus agalactiae
gtgcctattcaggccttatgccaactcttgaaggggtctcgttcaggctattacaagtggctcaatcgtcaaaaaacagattttgagacaaaaaatacaaagctaatggctaaaatcaaggaacttcatagactctacaatggtatcttaggttatcgccgtatgacaacatttattaatcgtcaacttgggacaact

SEQ ID NO: 10444 - protein, 66 aa, Streptococcus agalactiae
MPIQALCQLLKGSRSGYYKWLNRQKTDFETKNTKLMAKIKELHRLYNGILGYRRMTTFINRQLGTT

SEQ ID NO: 10445 - DNA, 207 bp, Streptococcus agalactiae
atgtcccggattggcaaatgtattgataatgcaccaactgaaagtttctttgggtttttcaagactgagtcttaccaccttaagaaatacaactcttatgatgagttggtcaatgatgtggcacgttatatcgaattctacaacacacaacgttatcaatcaaaattaaacaacctgactcctctagaattcaggaatcaggttgca

SEQ ID NO: 10446 - protein, 69 aa, Streptococcus agalactiae
MSRIGKCIDNAPTESFFGFFKTESYHLKKYNSYDELVNDVARYIEFYNTQRYQSKLNNLTPLEFRNQVA

SEQ ID NO: 10447 - DNA, 114 bp, Streptococcus agalactiae
ttggtaaccatttttatgaaattttttaaagttaaaaatataatttataatactatcttcttccattttctgattttagttctgaaagttccaaaaggtgcaaccgtatttaca

SEQ ID NO: 10448 - protein, 38 aa, Streptococcus agalactiae
MVTIFMKFFKVKNIIYNTIFFHFLILVLKVPKGATVFT

SEQ ID NO: 10449 - DNA, 234 bp, Streptococcus agalactiae
ttgttttttccgaatattgacaacataattaaaaactatatcaaagagatgattacacattccgatataccagacttacaaaaacaactggaaacagcatatcaagttccatattctttcgctcttggtatttatatctcaacaattgaaagtattattttaaattggatagatcatgactttactgaagagcctgaagaaatagcaagatatattacatctgtcgtgagaatt

SEQ ID NO: 10450 - protein, 78 aa, Streptococcus agalactiae
MFFPNIDNIIKNYIKEMITHSDIPDLQKQLETAYQVPYSFALGIYISTIESIILNWIDHDFTEEPEEIARYITSVVRI

SEQ ID NO: 10451 - DNA, 390 bp, Streptococcus agalactiae
gtgaactattatttgaatttgtattgtataatcacattcgataagatttataactttaagattttatataaaggtgatagtatattggtaagttcagataacactaatttaaaatttttaaaagctttctcagaattgttaaagatgaggagctttgagcaaattaaagttagcgatttagcaaaaaaagctcgacttagtagaagatctttctataatcattacaattcaaaagaagacttccttagggagtctattttaataatctttgatgatatcacaaaaattttaaataatgatttattatatgaagaagtggtcttaaaggagatgcttagctatatgtatataaataaagaaattattaaatcctttgttttttccgaatat

SEQ ID NO: 10452 - protein, 130 aa, Streptococcus agalactiae
MNYYLNLYCIITFDKIYNFKILYKGDSILVSSDNTNLKFLKAFSELLKMRSFEQIKVSDLAKKARLSRRSFYNHYNSKEDFLRESILIIFDDITKILNNDLLYEEVVLKEMLSYMYINKEIIKSFVFSEY

SEQ ID NO: 10453 - DNA, 327 bp, Streptococcus agalactiae
atgcttaggaagtataagcaaagaaattataatgtcgcacatacgaaacagcgtttttcgattaagaaattcaaatttggtgtagcatcggtattaattggattgacatttctaggaatgagtagtcattctgttttggcggatgagtcaagcattatgagtactgaggtaccacaaacagctggtgtaaaaccggaagttactgttacacagcctacttcagatgtaacaagtcttgcgacagatacgtcaacttcagcagtgttatcaacagatgcatctcattctaatcctacagaatcagcggagcatgctgtaggattagaa

SEQ ID NO: 10454 - protein, 109 aa, Streptococcus agalactiae
MLRKYKQRNYNVAHTKQRFSIKKFKFGVASVLIGLTFLGMSSHSVLADESSIMSTEVPQTAGVKPEVTVTQPTSDVTSLATDTSTSAVLSTDASHSNPTESAEHAVGLE

SEQ ID NO: 10455 - DNA, 318 bp, Streptococcus agalactiae
gtgttacaatctgttttaaaagacacaaaaacgaaaggacaacctatgtcaacatttaaacgctatgatgaagaattcaaacaatctcttgttaacctttatcaaactggaaaaactcagtctgaactctgtaaagactatagggtatccacttctgcgcttgcaaaatggatcaaacagtactctcaattcaaactcgaagataattctgtacttactgccaagcaaatacaagagttacaaaaacgtaatgcgcagcttgaagaggagaaccttatcctaaaaaaagcaagtgccatattcatgcaaaacttaaag

SEQ ID NO: 10456 - protein, 106 aa, Streptococcus agalactiae
MLQSVLKDTKTKGQPMSTFKRYDEEFKQSLVNLYQTGKTQSELCKDYRVSTSALAKWIKQYSQFKLEDNSVLTAKQIQELQKRNAQLEEENLILKKASAIFMQNLK

SEQ ID NO: 10457 - DNA, 186 bp, Streptococcus agalactiae
atgagcggattgctaagagcaattgtcaaaatttctcagtctatgctagaagagttcttcttaatcccaatatgtcatttgtcacgattaacacggattggaaataacatcaatcaaattgcgcgtgctatcaaccaaagccatctaatttctcaggctcagtatcactttcatcgagaagcacgt

SEQ ID NO: 10458 - protein, 62 aa, Streptococcus agalactiae
MSGLLRAIVKISQSMLEEFFLIPICHLSRLTRIGNNINQIARAINQSHLISQAQYHFHREAR

SEQ ID NO: 10459 - DNA, 144 bp, Streptococcus agalactiae
atggggaatggtcattttgtgaccatcatcgactatggcacaggtaatccctatacctcaacaacgcctcttattactgggaaaattggtgaggattttgcttattacttaaccgaatcagagcaacccccctgctgttgggct

SEQ ID NO: 10460 - protein, 48 aa, Streptococcus agalactiae
MGNGHFVTIIDYGTGNPYTSTTPLITGKIGEDFAYYLTESEQPPCCWA

SEQ ID NO: 10461 - DNA, 96 bp, Streptococcus agalactiae
ttgttttcatcattttattttgtagtctttacaaacctaaagaaaaattctagaaatgataatgaaggcggtctatcaaatggttacattcgattt

SEQ ID NO: 10462 - protein, 32 aa, Streptococcus agalactiae
MFSSFYFVVFTNLKKNSRNDNEGGLSNGYIRF

SEQ ID NO: 10463 - DNA, 93 bp, Streptococcus agalactiae
ttgaaaattcatatcgtcgacgaaaaacaattagaagttctagaactattagctatatttgaatttcaaaatggaaagcacttaggatactct

SEQ ID NO: 10464 - protein, 31 aa, Streptococcus agalactiae
MKIHIVDEKQLEVLELLAIFEFQNGKHLGYS

SEQ ID NO: 10465 - DNA, 102 bp, Streptococcus agalactiae
atgatatttgaagagtccaaagatctaatagatagtccagttagagaagcgttgattataagtgataaggattttcaaaaattaaaacaagagctattattt

SEQ ID NO: 10466 - protein, 34 aa, Streptococcus agalactiae
MIFEESKDLIDSPVREALIISDKDFQKLKQELLF

SEQ ID NO: 10467 - DNA, 108 bp, Streptococcus agalactiae
gtgtcactccaatcttttaaactgtttttaggacattttttaaagacagagataaggttatcaatgtccttgaatcgccttattcaaacaccaaacttgagcaaccaa

SEQ ID NO: 10468 - protein, 36 aa, Streptococcus agalactiae
MSLQSFKLFLGHFLKTEIRLSMSLNRLIQTPNLSNQ

SEQ ID NO: 10469 - DNA, 303 bp, Streptococcus agalactiae
atgggacgttctaatattttgagtaggtgtgaacaatgttctgataatcaatgtggcttgtataaaacgcggcttaaagacaagttactattagtagtccaactggttggaaatattaggtattctgagtttcttacggaaggtggtgtatatcataagggagaaaccttgttggaagttataaccttaggaatttcttatgaatataaaagttatggggatatcaaagtaatcaagaagtactgtgctgatggcagtgtcgttgattataacatgccaatactattaatggaaaggattgaa

SEQ ID NO: 10470 - protein, 101 aa, Streptococcus agalactiae
MGRSNILSRCEQCSDNQCGLYKTRLKDKLLLVVQLVGNIRYSEFLTEGGVYHKGETLLEVITLGISYEYKSYGDIKVIKKYCADGSVVDYNMPILLMERIE

SEQ ID NO: 10471 - DNA, 474 bp, Streptococcus agalactiae
atgaccaagctaagtagtgaagaaattataaaaatgttacctcatcgctatccgtttctaatggtggatagagtgcagagttataaaaaaggtatcattgaatgtcgtaagaatattactatcaacgaaccttactttcaaggacattttccacaacgtcctatagttccgggtgttttgatgattgagatggcagctcaatctgcagctttactttatattttagatgcacttgatggtagcctcccctctcttgatgaattaacagcagagaaaatagcagaaaaagtaggttatttagccagtgtgaagaatttcaaattcaagaaaattgttactccaggagaccagctaaacattacatgtaaatctcaatcaaaattggggcatcttttagaaattcaagtcgttattagagatgagaataaaaaagaggttgcctcaggaaggatgttggtatcagaaaatggaaat

SEQ ID NO: 10472 - protein, 158 aa, Streptococcus agalactiae
MTKLSSEEIIKMLPHRYPFLMVDRVQSYKKGIIECRKNITINEPYFQGHFPQRPIVPGVLMIEMAAQSAALLYILDALDGSLPSLDELTAEKIAEKVGYLASVKNFKFKKIVTPGDQLNITCKSQSKLGHLLEIQVVIRDENKKEVASGRMLVSENGN

SEQ ID NO: 10473 - DNA, 339 bp, Streptococcus agalactiae
atgagtgaattcctttcagccaaacctattggtcataatgattcatctaatactattttaagaattatagagaatacgaaatatattcatcactatgatggaaaagttgttgtcgaaattcctcctcaaaaagagcctatcaaagtcttttttatggattcacgtcttcattatttagaattttcagacatatgtcggtatgtaactgttgttttgaaaaatagtaccgttgataatataaccaatttagggccagataatcatattgtttatgacaatggtgatgatatggttgatccgttgccgagtattcagcatggattatttcttaatgatgat

SEQ ID NO: 10474 - protein, 113 aa, Streptococcus agalactiae
MSEFLSAKPIGHNDSSNTILRIIENTKYIHHYDGKVVVEIPPQKEPIKVFFMDSRLHYLEFSDICRYVTVVLKNSTVDNITNLGPDNHIVYDNGDDMVDPLPSIQHGLFLNDD

SEQ ID NO: 10475 - DNA, 135 bp, Streptococcus agalactiae
gtgtttgatgcagcacacgccgtacaaagtagtaggcttaaagcaacagttgatagctttgttatattcttcatgcattctccttattgtctggaaaacatagctttaccaaagtgtcaaacgtttttctggttt

SEQ ID NO: 10476 - protein, 45 aa, Streptococcus agalactiae
MFDAAHAVQSSRLKATVDSFVIFFMHSPYCLENIALPKCQTFFWF

SEQ ID NO: 10477 - DNA, 192 bp, Streptococcus agalactiae
ttgctaacaagttatgcaaaaagtatagatgtcttgaatcaattaattacttctctacaaggcggcatgttagtagtatctattatcctagtgatgatggctctgctattctggattggtggtagaacccatgagacaggtattttattagctattggtaagtctaaagcaattatcattgtcagtacgcag

SEQ ID NO: 10478 - protein, 64 aa, Streptococcus agalactiae
MLTSYAKSIDVLNQLITSLQGGMLVVSIILVMMALLFWIGGRTHETGILLAIGKSKAIIIVSTQ

SEQ ID NO: 10479 - DNA, 96 bp, Streptococcus agalactiae
atgatatcggctccagaaatgattgctacggtagaggtattcttgattagattaacaacttggttggtcattggtggtaaaattgttctgacagct

SEQ ID NO: 10480 - protein, 32 aa, Streptococcus agalactiae
MISAPEMIATVEVFLIRLTTWLVIGGKIVLTA

SEQ ID NO: 10481 - DNA, 456 bp, Streptococcus agalactiae
ttggacttagtcttatcaagccagacggacttgactaattatgttaagaaggtgtctatagaagattttggatgtcagtttttacatactgcacattggaataatcgcttaagaacaactggaggacgcttctttccaaacgatagacaccttgactttaatcccaaaatttatcgtgagtttggtattgatatttttcgtaagattgtaagacatgagctttgccattatcatctctatatacaaggtaaaggatatcaacatagggataaagcttttaaagagttactagaaaaagtcgatggcttacgatatacccctagagttacggctgttaaagtgaattatcatcattactcttgccaatcttgcggtcaagtataccgacgtaggagacgtgttaatttacgcaagtttgcttgtggttattgtcatggtcgcttgatagagagtttt

SEQ ID NO: 10482 - protein, 152 aa, Streptococcus agalactiae
MDLVLSSQTDLTNYVKKVSIEDFGCQFLHTAHWNNRLRTTGGRFFPNDRHLDFNPKIYREFGIDIFRKIVRHELCHYHLYIQGKGYQHRDKAFKELLEKVDGLRYTPRVTAVKVNYHHYSCQSCGQVYRRRRRVNLRKFACGYCHGRLIESF

SEQ ID NO: 10483 - DNA, 168 bp, Streptococcus agalactiae
atgaatgaagagactgcagatgtaactgctagacttgccagcatcgctagtaagaaactccagacaggtgttaaacttagtgctagtaataagaaagagattagcacagtggttatactgaagagagcgatacgagcaaaaaagactagctcacgcaacttagcactg

SEQ ID NO: 10484 - protein, 56 aa, Streptococcus agalactiae
MNEETADVTARLASIASKKLQTGVKLSASNKKEISTVVILKRAIRAKKTSSRNLAL

SEQ ID NO: 10485 - DNA, 273 bp, Streptococcus agalactiae
atgtcatcaccacttaagcaagagcaaactcacgaaagcaaaacagagcaagctcaaccaaaatttcaagtatttcaagaatttgatcacagtgctaagttgcgtgagctagtcttttttgctcgtatcgctctcttcagtataaccactgtgctaatctctttcttattactagcactaagtttaacacctgtctggagtttcttactagcgatgctggcaagtctagcagttacatctgcagtctcttcattcatttggtcactcagacaa

SEQ ID NO: 10486 - protein, 91 aa, Streptococcus agalactiae
MSSPLKQEQTHESKTEQAQPKFQVFQEFDHSAKLRELVFFARIALFSITTVLISFLLLALSLTPVWSFLLAMLASLAVTSAVSSFIWSLRQ

SEQ ID NO: 10487 - DNA, 93 bp, Streptococcus agalactiae
atggactgggcaactgtttccaaggccacttatttttggaaagcccagcctttttcttttaatagtcatgattataattttgggattacttta

SEQ ID NO: 10488 - protein, 31 aa, Streptococcus agalactiae
MDWATVSKATYFWKAQPFSFNSHDYNFGITL

SEQ ID NO: 10489 - DNA, 441 bp, Streptococcus agalactiae
atgataatgagtaatcgaagtattttagacgagcgattatgttttacggttagtgaaacacatcgacttttcaataaattttaccaaaaagctttggatgaatttcaattgacttatctccaatacgttatcttgttagtcctttgggaagaggatcatcggcatatgaaggaacttagttatgcactatctcttaattcgaataccctaactccagttttaaagcgtatggaaaatcgtgggtggattgtacgagaaaaaccaagagatgataaaaggcaactcattattcatctaagtaacaaaggtattgagtcacaagatgccgttgtcaatgcggtgcaatcgtgcgggtattttttctcagaaattagtcctgaatcttatcaaaaaactgtttctgccctttcttcacttaaccaagttataaaatcacattta

SEQ ID NO: 10490 - protein, 147 aa, Streptococcus agalactiae
MIMSNRSILDERLCFTVSETHRLFNKFYQKALDEFQLTYLQYVILLVLWEEDHRHMKELSYALSLNSNTLTPVLKRMENRGWIVREKPRDDKRQLIIHLSNKGIESQDAVVNAVQSCGYFFSEISPESYQKTVSALSSLNQVIKSHL

SEQ ID NO: 10491 - DNA, 114 bp, Streptococcus agalactiae
atgaaagttttgaattcaatggttttctcctttaaaataatcacttataagtatatgaagaatactaagcaaggtcaagtgagtcgtttcactaatctaaatacctttttaaga

SEQ ID NO: 10492 - protein, 38 aa, Streptococcus agalactiae
MKVLNSMVFSFKIITYKYMKNTKQGQVSRFTNLNTFLR

SEQ ID NO: 10493 - DNA, 117 bp, Streptococcus agalactiae
gtggcaactgacataagtgtcaaaaagcctgctgcaagttttgatcttgttttcatgatttataactcctttttgtcattaactccattattatatcataatttcttaaaaatgcct

SEQ ID NO: 10494 - protein, 39 aa, Streptococcus agalactiae
MATDISVKKPAASFDLVFMIYNSFLSLTPLLYHNFLKMP

SEQ ID NO: 10495 - DNA, 243 bp, Streptococcus agalactiae
ttgaacaatcaaattaatcattgtttcaaaagcataatggttttaggagttactcaaatgaaaaaggaatttattattacaggtcggatggttgcaagagttatggaaaccctagtttgcttatgtatggtaagtaatcttgttcttgatatgcttgatataatagaaataaatgaaattgtattttgtgtgttggtagcatcaattgcagggcttgagttttgtttgcaaaaagaaagggag

SEQ ID NO: 10496 - protein, 81 aa, Streptococcus agalactiae
MNNQINHCFKSIMVLGVTQMKKEFIITGRMVARVMETLVCLCMVSNLVLDMLDIIEINEIVFCVLVASIAGLEFCLQKERE

SEQ ID NO: 10497 - DNA, 213 bp, Streptococcus agalactiae
atgggattaattttaaaaaatagactcaaagaattgcgtgcacgagatggtatcaatcaaacagaactcgctaaattaacaggagtctcaagacaaacaattagcctaattgaacgcggagaatatacgccatctgttattattgctatgaagatttctcaagtatttaaagaatccctagagaatgtttttagtttagtgtcaatggaggaa

SEQ ID NO: 10498 - protein, 71 aa, Streptococcus agalactiae
MGLILKNRLKELRARDGINQTELAKLTGVSRQTISLIERGEYTPSVIIAMKISQVFKESLENVFSLVSMEE

SEQ ID NO: 10499 - DNA, 126 bp, Streptococcus agalactiae
ttggggtgcgtaacagctgagattatacccattgaacttgatgcagttagtactgtcgaagggaaatgtgtgccattacaagttttttgtggtggaaaagggcgtagtgtcttcttagtagacagc

SEQ ID NO: 10500 - protein, 42 aa, Streptococcus agalactiae
MGCVTAEIIPIELDAVSTVEGKCVPLQVFCGGKGRSVFLVDS

SEQ ID NO: 10501 - DNA, 123 bp, Streptococcus agalactiae
atgcttcgtaaaggtttctttaaaaacttgggcgaaggtcaatctgatatcatttgtgatgggactctctttatttctagggacgtatttttggggaaaattaccccatcaattcgtcttagc

SEQ ID NO: 10502 - protein, 41 aa, Streptococcus agalactiae
MLRKGFFKNLGEGQSDIICDGTLFISRDVFLGKITPSIRLS

SEQ ID NO: 10503 - DNA, 450 bp, Streptococcus agalactiae
atgaagattgataaatatactgcgattttaggaaatactgttagttacccagatatgcacagtttgacggataatcgtccgcttgcttctctaccttttgatggtaagtatcgtttaattgattttcaattatcctctttagctaatgcaggcgttagaagtatttatggtatttttcgtgggaataatgttcgctctgtttttgaccatattagaagtggtcgtgagtggggcttaggtacactgttgagtcactattctttaggattctatgatacagacgatgatactcgtacagtcaatggggattattacgatcaaattttaacttacttgaggcgttcgggtagcgaccagacgatatatatgagttgtgatatgctttgtaatattgacttaagtcaagtaatccacttgcataatgcaaatggtgcgcaagccaccgtggtt

SEQ ID NO: 10504 - protein, 150 aa, Streptococcus agalactiae
MKIDKYTAILGNTVSYPDMHSLTDNRPLASLPFDGKYRLIDFQLSSLANAGVRSIYGIFRGNNVRSVFDHIRSGREWGLGTLLSHYSLGFYDTDDDTRTVNGDYYDQILTYLRRSGSDQTIYMSCDMLCNIDLSQVIHLHNANGAQATVV

SEQ ID NO: 10505 - DNA, 228 bp, Streptococcus agalactiae
atgatattaaatatagtaactatagttagtaattttatttttattgcccttttttatcaactttttgtagatttatttgactggtctaaaatgattaaaatgtcccctcaaaacatctcaaaattaaaagtttttattttgttgataagtatagttggtggctatgtggttagtcattttttattggaagtgattcagttgtgtcaatcaatcttttgggctctccaa

SEQ ID NO: 10506 - protein, 76 aa, Streptococcus agalactiae
MILNIVTIVSNFIFIALFYQLFVDLFDWSKMIKMSPQNISKLKVFILLISIVGGYVVSHFLLEVIQLCQSIFWALQ

SEQ ID NO: 10507 - DNA, 201 bp, Streptococcus agalactiae; identical to SEQ ID NO: 9015

SEQ ID NO: 10508 - protein, 67 aa, Streptococcus agalactiae
MRRNMASSGWKYVLKQIGLIVLVILLALLFLAVGLMLGYSVFGDGEHAYSILSLDKWQNIIGKFLGK

SEQ ID NO: 10509 - DNA, 168 bp, Streptococcus agalactiae
atgaaaggctataattccaaccttatggttaaagggctaggttgttctacgctttacttaattattagtttgacagcgttggttcttttagtgattgctggtgttttctttgtcattaatacttgcaagcttacaaggaaagcagtggagaacctatccataatcaac

SEQ ID NO: 10510 - protein, 56 aa, Streptococcus agalactiae
MKGYNSNLMVKGLGCSTLYLIISLTALVLLVIAGVFFVINTCKLTRKAVENLSIIN

SEQ ID NO: 10511 - DNA, 117 bp, Streptococcus agalactiae
gtgttgaataagttatggaatagtggcacgtatactaagactaaaaatgctaaaatctccattattataccaaaattaattaatttattaccaaaaatagatagtgctttaatagat

SEQ ID NO: 10512 - protein, 39 aa, Streptococcus agalactiae
MLNKLWNSGTYTKTKNAKISIIIPKLINLLPKIDSALID

SEQ ID NO: 10513 - DNA, 228 bp, Streptococcus agalactiae
atgaaaacacaatatcctatgattccctttcctctcattgtaaaggcaacagatggcgataccgaagcgattaaccagattctacatcattacagagggtacataacgaagcgttccctacgacttatgaaagatgaatatggcaatcaaagtatggtcgttgatgaagtcttacgtggaagaatggaaaccagactgattacaaagattttgtcatttgaaattaag

SEQ ID NO: 10514 - protein, 76 aa, Streptococcus agalactiae
MKTQYPMIPFPLIVKATDGDTEAINQILHHYRGYITKRSLRLMKDEYGNQSMVVDEVLRGRMETRLITKILSFEIK

SEQ ID NO: 10515 - DNA, 429 bp, Streptococcus agalactiae
gtgagaaacatgaaaccatcttcttttcagaccacaatagaaaatcagtttgactatatctgtaaacgtgctatggaagacgagcgaaagaattatatgctttatctttcaaggattgcaaagcgtgaggtgtccttttcggatgttggcgattatcttgttagccagtttgcgacaacagataactattcaactgactttcagatttttacactcaatgggttatcagtaggcgttgaaaatgatttgttgagtgaagcattacgtgagttgccagacaagaaacgtgaaattctactgctgttttactttatggacatgagcgattcagaaattgcagacctgttgaaattgaaccgttctactgtctatcggcatagaaccagtggactagccttaattaaaaagtttatggaggaatttgaagaa

SEQ ID NO: 10516 - protein, 143 aa, Streptococcus agalactiae
MRNMKPSSFQTTIENQFDYICKRAMEDERKNYMLYLSRIAKREVSFSDVGDYLVSQFATTDNYSTDFQIFTLNGLSVGVENDLLSEALRELPDKKREILLLFYFMDMSDSEIADLLKLNRSTVYRHRTSGLALIKKFMEEFEE

SEQ ID NO: 10517 - DNA, 141 bp, Streptococcus agalactiae
atgtttttgtttgtcaataaaaaaattggtatagtctttttgattttctgtgataacgagataaacgctatcaaaaattctatctatcttaaaaaaatatatttcttagccattttattacataaaaagaatggtatcaaa

SEQ ID NO: 10518 - protein, 47 aa, Streptococcus agalactiae
MFLFVNKKIGIVFLIFCDNEINAIKNSIYLKKIYFLAILLHKKNGIK

SEQ ID NO: 10519 - DNA, 123 bp, Streptococcus agalactiae
gtggaatctgagtgtttagctcagatttttaaaaaaattattattttacataacttaatttatgtatttatttttatgggagaattaataaaaaagtgctataatataggtgtattcatagtg

SEQ ID NO: 10520 - protein, 41 aa, Streptococcus agalactiae
MESECLAQIFKKIIILHNLIYVFIFMGELIKKCYNIGVFIV

SEQ ID NO: 10521 - DNA, 93 bp, Streptococcus agalactiae
atgaaaacaaataagacagctaatattggcaaaattgaacgttttctcatgtactatcctctctcttttgctctgttatggacaaatctatta

SEQ ID NO: 10522 - protein, 31 aa, Streptococcus agalactiae
MKTNKTANIGKIERFLMYYPLSFALLWTNLL

SEQ ID NO: 10523 - DNA, 117 bp, Streptococcus agalactiae
ttgattatctggcaggatttttccagagagctcaatttagaacaagtatattatttcaatgaggaagatattgatgaagtaatttttggaggtaccatgacgaagagcaagaaagag

SEQ ID NO: 10524 - protein, 39 aa, Streptococcus agalactiae
MIIWQDFSRELNLEQVYYFNEEDIDEVIFGGTMTKSKKE

SEQ ID NO: 10525 - DNA, 144 bp, Streptococcus agalactiae
atgcatacagaaaatatgaattttataaaacctaaaggatcaccaaaattacttgcatataaccctatgcaagatataaatagtccaatccatggaaaaattttaatatatgaatattctatttcaaactcaattaacggtcca

SEQ ID NO: 10526 - protein, 48 aa, Streptococcus agalactiae
MHTENMNFIKPKGSPKLLAYNPMQDINSPIHGKILIYEYSISNSINGP

SEQ ID NO: 10527 - DNA, 108 bp, Streptococcus agalactiae
gtgattccactggctcctgattgtattgcagttgcacaggtggatgcgacggaggcatcactttgtatttttgccatttggtctcctttcttagtctatggtgagttt

SEQ ID NO: 10528 - protein, 36 aa, Streptococcus agalactiae
MIPLAPDCIAVAQVDATEASLCIFAIWSPFLVYGEF

SEQ ID NO: 10529 - DNA, 165 bp, Streptococcus agalactiae
atgttagttatttgttattatcaatcactccgctacgaatttaatattgaagaggagaaatcctttctaatatcatcaaacggcaagtcgccaataccagtatcagatttagaaaatgacatcacgctaaaaaatatacaaggtcaattggtatatattattgac

SEQ ID NO: 10530 - protein, 55 aa, Streptococcus agalactiae
MLVICYYQSLRYEFNIEEEKSFLISSNGKSPIPVSDLENDITLKNIQGQLVYIID

SEQ ID NO: 10531 - DNA, 240 bp, Streptococcus agalactiae
atgaatacacatattaacattactctagatatgggggaaacctcaaaagatttacgtatccctttgaaaattagcgttaagcaattagtaatggaattagatagtatttttagccgtactgaaaggcgtaccaaatatcaactaagagttataaataaaggtattttattgggagagaacgatatattagctcaccatccagtaacaactggtgatcgtataaggatagaggagttttat

SEQ ID NO: 10532 - protein, 80 aa, Streptococcus agalactiae
MNTHINITLDMGETSKDLRIPLKISVKQLVMELDSIFSRTERRTKYQLRVINKGILLGENDILAHHPVTTGDRIRIEEFY

SEQ ID NO: 10533 - DNA, 321 bp, Streptococcus agalactiae
atgttaaaaacacgaacacatattaatgaattagaaacaaaaatcgcccttgatttagtacacagatatctaggtattcaacaacttgttttttcaaagtggaggcattctttagaaactggttcatggtcttctattataacaataaatggcgttaatattatcaattacattgttgatgatattagtgacagtaatagtatttcaggtattatttgtcatcctaaaagttttcatctcagacctagagaaaaaaaggaacctattcagtctattgatgagttagatatcacctggtctttgaatagagaggaaaatgaa

SEQ ID NO: 10534 - protein, 107 aa, Streptococcus agalactiae
MLKTRTHINELETKIALDLVHRYLGIQQLVFSKWRHSLETGSWSSIITINGVNIINYIVDDISDSNSISGIICHPKSFHLRPREKKEPIQSIDELDITWSLNREENE

SEQ ID NO: 10535 - DNA, 336 bp, Streptococcus agalactiae
atgcaaatcatcaaacgtgatggacagattgttgaatttgatcctgaaaaaatctaccaagctatcttgaaagctgctcaaacagtttatgtgcttgatgagtcacttcgtcaagaccttgctcaagtgactaaaaaagtaatcttagatttagaggatgctcaggttgaacgaccaacgatcaatatgattcagtctttggttgaaaatcgtttattggatgcaggatacattcatactgctgaacactatatttcataccgtttgcaacgtgatttagagcgaaatggctatgatgatcaaatcactgttcatttacactttgaaaaaattaag

SEQ ID NO: 10536 - protein, 112 aa, Streptococcus agalactiae
MQIIKRDGQIVEFDPEKIYQAILKAAQTVYVLDESLRQDLAQVTKKVILDLEDAQVERPTINMIQSLVENRLLDAGYIHTAEHYISYRLQRDLERNGYDDQITVHLHFEKIK

SEQ ID NO: 10537 - DNA, 141 bp, Streptococcus agalactiae
atgttaactaataattctagaacaatttcagtgataaataaattacctaaaacaggtgatgatcaaaatgtcatttttaaacttgtaggttttggtttaattttgttaacaagtcgctgcggtttgagacgcaatgaaaat

SEQ ID NO: 10538 - protein, 47 aa, Streptococcus agalactiae
MLTNNSRTISVINKLPKTGDDQNVIFKLVGFGLILLTSRCGLRRNEN

SEQ ID NO: 10539 - DNA, 90 bp, Streptococcus agalactiae
atgcaaaaaagaaagaaccaaactggttctttcttttttgcttttcagctacttaccacaatttgtaagaaattacaagtagtagtaagc

SEQ ID NO: 10540 - protein, 30 aa, Streptococcus agalactiae
MQKRKNQTGSFFFAFQLLTTICKKLQVVVS

SEQ ID NO: 10541 - DNA, 195 bp, Streptococcus agalactiae
atgaaaaaaaggcttcaactattattactgatatttatttctgcagtttcatggtttatcagtaaccaactagcaactaagaatacggtattatctgttttaataggtttagttgcagttattgggataacgtggttaattgtaagtctgctctattatttgatcgtgaagttaattgcagttatatttcatgat

SEQ ID NO: 10542 - protein, 65 aa, Streptococcus agalactiae
MKKRLQLLLLIFISAVSWFISNQLATKNTVLSVLIGLVAVIGITWLIVSLLYYLIVKLIAVIFHD

SEQ ID NO: 10543 - DNA, 345 bp, Streptococcus agalactiae
atggcatttgaaaaagaaataaatcttccagactgcaattacatttacactatcagcccgaacattaaaaaatataccttacgcgatactacattcactcaaaatcgcttaggtaattatgaattagagcgtctcctagaaacagtgcctaattctggcgatggctttcctctaaagattacaatcaataaagaactttctggttttaagctcttaattactgataaatctggccttagaatagtaaatatctttaaatctaccgatcataaaattcttcaagacaaattttatttcttaatggacagcctcgttgagcgtgatatctttacgaaaaccacaaaa

SEQ ID NO: 10544 - protein, 115 aa, Streptococcus agalactiae
MAFEKEINLPDCNYIYTISPNIKKYTLRDTTFTQNRLGNYELERLLETVPNSGDGFPLKITINKELSGFKLLITDKSGLRIVNIFKSTDHKILQDKFYFLMDSLVERDIFTKTTK

SEQ ID NO: 10545 - DNA, 339 bp, Streptococcus agalactiae
atgtctaggaaaacatttaaacgtatactatcgattggagtttgcacgctcgtactatcgatgagtctttattacactgaaaaagcccacgctattgctggtcctagtgaccgccaatacgtagaaaacccaaatcctcacattattgtaaatgttacaggtactgatcaaaacggaaatagcattttaccgcattatatcgaagtcaatgtaaagatgggacaaactttaagtaaaaaagaaattctagattatattgctcgaaatttaaactctagtgtggaggagaaagtaaaaacgttcaatacagcaacatcgagtttaaggaaagtgcttatc

SEQ ID NO: 10546 - protein, 113 aa, Streptococcus agalactiae
MSRKTFKRILSIGVCTLVLSMSLYYTEKAHAIAGPSDRQYVENPNPHIIVNVTGTDQNGNSILPHYIEVNVKMGQTLSKKEILDYIARNLNSSVEEKVKTFNTATSSLRKVLI

SEQ ID NO: 10547 - DNA, 237 bp, Streptococcus agalactiae
atgacactcttcttagattctttactaaaggagctaataatcgtgaatcgtcttagagaatacagaattaaagctagcatatctcaattagctttagcaaaatcagttggtgtcgccagacaaacaataaaccttattgaaaataataaatacaatccttcgctagatctttgtataagactagcggaatgcctacaaacagacctcaatactcttttttgggatagtagacatcta

SEQ ID NO: 10548 - protein, 79 aa, Streptococcus agalactiae
MTLFLDSLLKELIIVNRLREYRIKASISQLALAKSVGVARQTINLIENNKYNPSLDLCIRLAECLQTDLNTLFWDSRHL

SEQ ID NO: 10549 - DNA, 390 bp, Streptococcus agalactiae
atgaaattatacgttcaattaatggttattttaaccttttcattcgctggtgaggttctatctactatattcaacttacctgtaccaggcagtattattggattaatattactattcctagcgttaaaatacaaaatcatcaggctcaggcatattgatgccgtggggaattttctattagcaaatatgaccattttatttttaccaccagcagttggactgatggagcactttcaagacataaagccctatctttttgggatagctatcattatcttaggagcgctatttctcaatattctaactattggactggtatcccaatggatcaaaaagagatatgaaggagattatccagaaattggaggtaaaaatggcaactttaacgaa

SEQ ID NO: 10550 - protein, 130 aa, Streptococcus agalactiae
MKLYVQLMVILTFSFAGEVLSTIFNLPVPGSIIGLILLFLALKYKIIRLRHIDAVGNFLLANMTILFLPPAVGLMEHFQDIKPYLFGIAIIILGALFLNILTIGLVSQWIKKRYEGDYPEIGGKNGNFNE

SEQ ID NO: 10551 - DNA, 243 bp, Streptococcus agalactiae
ttgctgacagcttctatattggttattttagaatcttttggtacaactacactcatctcaatttcagagtatgaagcagttttatttagattatttgtcaaatcaatggttgacttaaatccatataaagtagtagcaacgaaaatagaagctaatactaaaattatagttgtaaaaattctagctttattcttaatacaaagaaataaacttactaaaatgattaaaacaattacaactcca

SEQ ID NO: 10552 - protein, 81 aa, Streptococcus agalactiae
MLTASILVILESFGTTTLISISEYEAVLFRLFVKSMVDLNPYKVVATKIEANTKIIVVKILALFLIQRNKLTKMIKTITTP

SEQ ID NO: 10553 - DNA, 405 bp, Streptococcus agalactiae
atggaaaaaattaggatttaccataacccaaattgtgggacatcaaggaacgtacttgccattattcgtcattgtggtattgaaccagaaattatttattatctgaaaacaccacctagcaggatggaactggttgaactgttgttagaaatgaaactttctgcgagggaacttctaagaacagatgttcctgcttatgagaaattcaatttggaatcttctagcgttacagatgaagaaatgattgatgcgatgatacaagatcctattcttatcaatcgtcccatagttgttacgagtaaaggtgcaaaactctgccgaccctgtgaagcaattttaaccattttacctgtaaagatggaaaaagattttgttaaagaagatggacagattatccaaagttta

SEQ ID NO: 10554 - protein, 135 aa, Streptococcus agalactiae
MEKIRIYHNPNCGTSRNVLAIIRHCGIEPEIIYYLKTPPSRMELVELLLEMKLSARELLRTDVPAYEKFNLESSSVTDEEMIDAMIQDPILINRPIVVTSKGAKLCRPCEAILTILPVKMEKDFVKEDGQIIQSL

SEQ ID NO: 10555 - DNA, 126 bp, Streptococcus agalactiae
gtgctaggagtggctgttgcagttgcggttgaagctgtggagttagacaaatcttgttgtgtggttgtggtgctagtctctttgacagtggtactttcagtctggggagcttcaacattattagtt

SEQ ID NO: 10556 - protein, 42 aa, Streptococcus agalactiae
MLGVAVAVAVEAVELDKSCCVVVVLVSLTVVLSVWGASTLLV

SEQ ID NO: 10557 - DNA, 129 bp, Streptococcus agalactiae
ttgcctagcttttttatcaaaaatttcctcatatcaaatgattttcatcaatttgatagtcctttagcagaccttgaagtctatcaaattcataacaaaaatgttcaggaatatgaccgtcagagccta

SEQ ID NO: 10558 - protein, 43 aa, Streptococcus agalactiae
MPSFFIKNFLISNDFHQFDSPLADLEVYQIHNKNVQEYDRQSL

SEQ ID NO: 10559 - DNA, 414 bp, Streptococcus agalactiae
atggtaatgaaagcaattgaaatttatatgaatattaatggtcgtggggccgaagctattacattttatgaagaggcttttaatacaaaagcagaacacgtcacaacttttgcacagggttggccagattgtccgccagaacttgaacatttaattatgaacgctcaatttaatattgatggtattcgaatgcaactttctgacaataatcctatttttgattttcaaattggacaaaatatgacagcagctttaattgtggaatctgtagaagaagcgcaagagttattcaataagctttctcgagatgcaatgaacattaaaatgcctctacaagcagttccgtggagtccagcttatggaaatgtgactgacaaatatggtatgacatggcaaatcaatactgagcttagc

SEQ ID NO: 10560 - protein, 138 aa, Streptococcus agalactiae
MVMKAIEIYMNINGRGAEAITFYEEAFNTKAEHVTTFAQGWPDCPPELEHLIMNAQFNIDGIRMQLSDNNPIFDFQIGQNMTAALIVESVEEAQELFNKLSRDAMNIKMPLQAVPWSPAYGNVTDKYGMTWQINTELS

SEQ ID NO: 10561 - DNA, 495 bp, Streptococcus agalactiae
atgattatcgactttaaaaccgtttcaactaaaggtttggagacttctccagtggcagaagccttggctggtttgcgtgcaaatgaagctcgctatttctggaataaattcaaagtagcctacgaaacatttccagtatcagactatccagaattgatggcagatattaatcaccttctaaaaaatgaacgtaaccttgtttttgctgcaaagcctttagagatttcacagctttttttagagaatcgtattttatggacacatgttttctatgaggatggtttagccattaatattttatatgaattagataatcctaaaaagagagctgtaggtttaaaattatcagatggaatggatattcctattgaattagcggacaagtttaagtttgctcgtcaaaagtcaaaactcgcaggtataatacgtggttcttattttaccctaaaaggggaaaatgaaactctgatgcagcgttggttggataatatgaag

SEQ ID NO: 10562 - protein, 165 aa, Streptococcus agalactiae
MIIDFKTVSTKGLETSPVAEALAGLRANEARYFWNKFKVAYETFPVSDYPELMADINHLLKNERNLVFAAKPLEISQLFLENRILWTHVFYEDGLAINILYELDNPKKRAVGLKLSDGMDIPIELADKFKFARQKSKLAGIIRGSYFTLKGENETLMQRWLDNMK

SEQ ID NO: 10563 - DNA, 378 bp, Streptococcus agalactiae
atggagaatcactttatttatggctatcgtaccattacacgattgctcaaaaaaatccacggattgactgttaatacaaagaaagtctatcgtatcatgaaaaataatggctggctttgtcggacacgtaccaagaaagttcccaatttgggtaaagcttattatttaacagataataaattgagtcgggatttccatgccgataagcctaaggaaaagctcgtaacagatattacctacctatatttcggtaactgtaaattgtatctctcatcaattatggatctctataaccgagaaattatagcttacactatctcagattgtcaggacacggattttgtactagacacccttaatcagttaaaattgcctaaa

SEQ ID NO: 10564 - protein, 126 aa, Streptococcus agalactiae
MENHFIYGYRTITRLLKKIHGLTVNTKKVYRIMKNNGWLCRTRTKKVPNLGKAYYLTDNKLSRDFHADKPKEKLVTDITYLYFGNCKLYLSSIMDLYNREIIAYTISDCQDTDFVLDTLNQLKLPK

SEQ ID NO: 10565 - DNA, 99 bp, Streptococcus agalactiae
ttgtgctacctcatcaaaaagaagttaggacaaatagctgtcaacaattgccttttgcttatcccttcagttgatgtgataaaagatggtagttgtcat

SEQ ID NO: 10566 - protein, 33 aa, Streptococcus agalactiae
MCYLIKKKLGQIAVNNCLLLIPSVDVIKDGSCH

SEQ ID NO: 10567 - DNA, 123 bp, Streptococcus agalactiae
ttgataaatgagatacatttaatcattatggcaaaagcaagaaaaatagctgtgtcatatgcaaataacccctgtttgctctttaaaaaagacgttatccttatttctctacacacagacgga

SEQ ID NO: 10568 - protein, 41 aa, Streptococcus agalactiae
MINEIHLIIMAKARKIAVSYANNPCLLFKKDVILISLHTDG

SEQ ID NO: 10569 - DNA, 318 bp, Streptococcus agalactiae
gtgttacaatctgttttaaaagacacaaaaacgaaaggacaacctatgtcaacatttaaacgctatgatgaagaattcaaacaatctcttgttaacctttatcaaactggaaaaactcagtctgaactctgtaaagactatggggtatccacttctacgcttgcaaaatggatcaaacagtattcccaagtcaaactcgaagataattctgtacttactgccaagcaaatacaagagttacaaaaacgtaatgcgcagcttgaagaggagaaccttatcctaaaaaaagcaagtgccatattcatgcaaaacttaaag

SEQ ID NO: 10570 - protein, 106 aa, Streptococcus agalactiae
MLQSVLKDTKTKGQPMSTFKRYDEEFKQSLVNLYQTGKTQSELCKDYGVSTSTLAKWIKQYSQVKLEDNSVLTAKQIQELQKRNAQLEEENLILKKASAIFMQNLK

SEQ ID NO: 10571 - DNA, 114 bp, Streptococcus agalactiae
ttgaaaaaatccatatatcctgactttaaatccgaagctctatcaaatccgaagctctatcaaatccatttcctaaaattattaattggtttaccatttcttaagtctcctaaa

SEQ ID NO: 10572 - protein, 38 aa, Streptococcus agalactiae
MKKSIYPDFKSEALSNPKLYQIHFLKLLIGLPFLKSPK

SEQ ID NO: 10573 - DNA, 363 bp, Streptococcus agalactiae
atggaaaatcgttatcgaaccaatttgaaaaaggtgtatttgagtgatcaagaattaattatcctcaataaaaatcttgctcagagtcagtgtccaaacttttcgcattatgccagaaaaaccttactcaatcctcgtatgaattttatcacaatcgatacaagaggttttcaagacctgatttttgaaattcgtaggattggaaataatataaaccagattgcacgttcggtaaatcaaagccacctacttagtcttcaacaagtcaaagaattgcagctcggtatagcagagttagaaacacagttacaacaagattttgacataaagtgtcagcgattgagagaattttatggtcatcac

SEQ ID NO: 10574 - protein, 121 aa, Streptococcus agalactiae
MENRYRTNLKKVYLSDQELIILNKNLAQSQCPNFSHYARKTLLNPRMNFITIDTRGFQDLIFEIRRIGNNINQIARSVNQSHLLSLQQVKELQLGIAELETQLQQDFDIKCQRLREFYGHH

SEQ ID NO: 10575 - DNA, 123 bp, Streptococcus agalactiae
ttgccagaacaagtatttcatgtacatcccggtaaatctgttctactttttggtgctgtaaatattttatccattcttcaagctgctgagatggttggtggtctattttcaataatttacctc

SEQ ID NO: 10576 - protein, 41 aa, Streptococcus agalactiae
MPEQVFHVHPGKSVLLFGAVNILSILQAAEMVGGLFSIIYL

SEQ ID NO: 10577 - DNA, 117 bp, Streptococcus agalactiae
ttgggggcggagccatcaagttatcttatcgttggctgtcaaaactggaaggttttggtcagctggcgatatgatttttgggatattgtggacacaatatctgagctcgcaaagacc

SEQ ID NO: 10578 - protein, 39 aa, Streptococcus agalactiae
MGAEPSSYLIVGCQNWKVLVSWRYDFWDIVDTISELAKT

SEQ ID NO: 10579 - DNA, 339 bp, Streptococcus agalactiae
atgcttgagaaggtcttccctgaggaaacttacccaaataccattctccatagtgaccaaggttggcaataccaacatgaagtctatcaccgctttcttgcaagtaaaggcatacatccttccatgtctcgcaaagggaccagcacggataatggtatgatggaatccttctttggtgtcttgaagaaagagatgttttatggctttgagaagactttcaagtctctggatcaactggagcaagctatcaccgagtatattttttactacaacaataaatgcattaaagaaaaactaaaaggacttagtcctgttcagtatagaattaaatcctttcaa

SEQ ID NO: 10580 - protein, 113 aa, Streptococcus agalactiae
MLEKVFPEETYPNTILHSDQGWQYQHEVYHRFLASKGIHPSMSRKGTSTDNGMMESFFGVLKKEMFYGFEKTFKSLDQLEQAITEYIFYYNNKCIKEKLKGLSPVQYRIKSFQ

SEQ ID NO: 10581 - DNA, 231 bp, Streptococcus agalactiae
ttgcaagttcaaatactccatgagattaataactttattattttagccaactttactaatcgtataaacattctccaaatttctcaacatcaattgagaaatttggctttttccgttgctcagttaaagcgtcctttagttgtatatttcctgttaatatcccttttgaagcataacattgttttcaatgatcgcatccgattgttgacacccattttagaacctattctt

SEQ ID NO: 10582 - protein, 77 aa, Streptococcus agalactiae
MQVQILHEINNFIILANFTNRINILQISQHQLRNLAFSVAQLKRPLVVYFLLISLLKHNIVFNDRIRLLTPILEPIL

SEQ ID NO: 10583 - DNA, 366 bp, Streptococcus agalactiae
atgattaaaaaaaatacttgtgaaatttattgttatgacgaagaaaaggtcaatcgaatacaaggtaatttacagacagtagatatttctagtgttgcccaaatgttaaaagctattgcagataaaaatagagcaaaaattacctatgcattgtgtcaagatgacgaactgtgtgtgtgtgatattgcaaatattataggtgttacggttgcaaatacctctcatcacctgcgaacgctccataagcaagggattgttaagtttcgaaaagagggaaaacttgcattttattccttagatgatgagcatatcagacaaattatgatgattgcattggcacataagaaagaggtgaagatcaatgtc

SEQ ID NO: 10584 - protein, 122 aa, Streptococcus agalactiae
MIKKNTCEIYCYDEEKVNRIQGNLQTVDISSVAQMLKAIADKNRAKITYALCQDDELCVCDIANIIGVTVANTSHHLRTLHKQGIVKFRKEGKLAFYSLDDEHIRQIMMIALAHKKEVKINV

SEQ ID NO: 10585 - DNA, 297 bp, Streptococcus agalactiae
atgaatcagcttgagtttcagcgtaatcacctgcaaatggactattacagcgagagctaccaagattttgaacgtgacttctaccgctactccaacatgaatattccattgatcttcctgaccgatgatatcctcaaaacaatggcgacttcacgtaagaattactttgtcctgaataaggaaaagtccaaagataaccgcgatcacttcttcatatttgaagtaagaaccttagaagagaatccactaatctatcattatacatataagaaaacaactacatacttaacacaaaaa

SEQ ID NO: 10586 - protein, 99 aa, Streptococcus agalactiae
MNQLEFQRNHLQMDYYSESYQDFERDFYRYSNMNIPLIFLTDDILKTMATSRKNYFVLNKEKSKDNRDHFFIFEVRTLEENPLIYHYTYKKTTTYLTQK

SEQ ID NO: 10587 - DNA, 111 bp, Streptococcus agalactiae
ttgattaaaaaggttatggttcataagaaaaacagggctctccatcgaaagcatgggagccctgtttttatcgaaaatttatcgatctatgattttccttatacagcatac

SEQ ID NO: 10588 - protein, 37 aa, Streptococcus agalactiae
MIKKVMVHKKNRALHRKHGSPVFIENLSIYDFPYTAY

SEQ ID NO: 10589 - DNA, 456 bp, Streptococcus agalactiae; identical to SEQ ID NO: 9041

SEQ ID NO: 10590 - protein, 152 aa, Streptococcus agalactiae
MNHLLNLSKENIAKIDFDFLNEALNANIRLKELVDELKISKELDSKGWSKKDSRTIKILYDGLINKHIVSLDRADYNIIQVIPFANVHVLLFLIPERENSKNYRIYNYSDYEMELINEDRQQFSKYETVDLDQLILVDIFNIDDYISSYLTI

SEQ ID NO: 10591 - DNA, 324 bp, Streptococcus agalactiae
ttgataaactatgctgataataaaagcgatagacatattttacaaacctgtttagaatttgctcaaaaaattgtagaatcagataaatctgaatatagtattctcattttactacaaataaaaaaacgattaaacatattaacacaaatggatagcaactatcttcattctctaatgaatcaaagttcggtagaaattaggtttgctgcagcctgtattctaggtaacaaagaacaagccagatattttttcgataaagaattcgctgatgaacaaaaagaacgatttctggaatatccgatttattacctccttagcctagac

SEQ ID NO: 10592 - protein, 108 aa, Streptococcus agalactiae
MINYADNKSDRHILQTCLEFAQKIVESDKSEYSILILLQIKKRLNILTQMDSNYLHSLMNQSSVEIRFAAACILGNKEQARYFFDKEFADEQKERFLEYPIYYLLSLD

SEQ ID NO: 10593 - DNA, 306 bp, Streptococcus agalactiae
atgaatcagcttgagtttaataaaaatctattacaaatggattattttagtgatagctaccgaaaatttgaagaggatttctatcgctactcagccctagatactccacttacttttttaacagatgatattatgcttgccatggcaaaatctcaaaagccttattttaagctaaataaggaaaattcgaaagaccatcgtgaccattattttatgttcaatgtggaaccttcacgagataataatctagttaggctatattgttacgattcaacgaagacacatatttcaaaaaacaggccaaaa

SEQ ID NO: 10594 - protein, 102 aa, Streptococcus agalactiae
MNQLEFNKNLLQMDYFSDSYRKFEEDFYRYSALDTPLTFLTDDIMLAMAKSQKPYFKLNKENSKDHRDHYFMFNVEPSRDNNLVRLYCYDSTKTHISKNRPK

SEQ ID NO: 10595 - DNA, 288 bp, Streptococcus agalactiae
atgttggagcaaattctacaaagtcttttgattttcgcagcaataggactgatgttgtttgtcctttatcggattgtgaaagtttcaggtgctttgtttcttatcggactcatcagtggattagtctttattgaaatctatggaatttacctcttctttactgagagatacctctattcagaagatttagcaactaatggagtttggagttttacaggattttttattgctttgaatctatttcttgtttttagcattattatgaagtggtggagaaatagaatagtt

SEQ ID NO: 10596 - protein, 96 aa, Streptococcus agalactiae
MLEQILQSLLIFAAIGLMLFVLYRIVKVSGALFLIGLISGLVFIEIYGIYLFFTERYLYSEDLATNGVWSFTGFFIALNLFLVFSIIMKWWRNRIV

SEQ ID NO: 10597 - DNA, 351 bp, Streptococcus agalactiae
atgaacacacgtgtctttaaggacatctcaaaggttcaacacagggcatggctgggatttacaactagacaggttatttttgtatttccagctgtcgccctaaccattttggttttgggcttgaacctattttattggcaatttggggattggtttgtctatggttttgtttttagctttaccattccactcatgttatttggggtctatcgccccaacgatttaccatttgaaatatacctcaagtaccgttttcattatgaactaacggtgccagaccgcacatttactggaagaaaaggagaccaacgtgaaaaaattaaaacactcaatgaaatcaaagacctcttc

SEQ ID NO: 10598 - protein, 117 aa, Streptococcus agalactiae
MNTRVFKDISKVQHRAWLGFTTRQVIFVFPAVALTILVLGLNLFYWQFGDWFVYGFVFSFTIPLMLFGVYRPNDLPFEIYLKYRFHYELTVPDRTFTGRKGDQREKIKTLNEIKDLF

SEQ ID NO: 10599 - DNA, 120 bp, Streptococcus agalactiae
atggaacagttttatgacgggcaatctctaagcaagtcacacttaataggaccaattgtagcaagactataccctctattgtcagatactctttcaggaataaactcaccagaagaccgt

SEQ ID NO: 10600 - protein, 40 aa, Streptococcus agalactiae
MEQFYDGQSLSKSHLIGPIVARLYPLLSDTLSGINSPEDR

SEQ ID NO: 10601 - DNA, 156 bp, Streptococcus agalactiae
gtgattctgacagacaatgagaggcagacgaaggttttggtctggcttttggagaatgagctgaatcatctcattcaaacttatcgaatattgacttttaaagcgaagaaatcgtggcgacagcaactcaaaacaatccgtggttttggcaaagag

SEQ ID NO: 10602 - protein, 52 aa, Streptococcus agalactiae
MILTDNERQTKVLVWLLENELNHLIQTYRILTFKAKKSWRQQLKTIRGFGKE

SEQ ID NO: 10603 - DNA, 381 bp, Streptococcus agalactiae
atgcttgaggtatatctaggaaataataccaatacaaatcaagatttactaaccattttgacgacctatggagtggcttatcgttgtacaaaagcatgtgaggtaaaccgtgaaatcatactgtcactctttgccaaaaccacggattgttttgagttgctgtcgccacgatttcttcgctttaaaagtcaatattcgataagtttgaatgagatgattcagctcattctccaaaagccagaccaaaaccttcgtctgcctctcattgtctgtcagaatcacgtctatccagctattgggctagacgaagtacgtacttttcttcccagacaggtaaaagaagagttgtttcaggccagtctgatgaaacaagtgacaggg

SEQ ID NO: 10604 - protein, 127 aa, Streptococcus agalactiae
MLEVYLGNNTNTNQDLLTILTTYGVAYRCTKACEVNREIILSLFAKTTDCFELLSPRFLRFKSQYSISLNEMIQLILQKPDQNLRLPLIVCQNHVYPAIGLDEVRTFLPRQVKEELFQASLMKQVTG

SEQ ID NO: 10605 - DNA, 96 bp, Streptococcus agalactiae
ttgaagaaggttagggtaagtttgatttcctttttcaatccactagaaaacccgcttggattcttccaaacgggttttgtttttatctttcagaaa

SEQ ID NO: 10606 - protein, 32 aa, Streptococcus agalactiae
MKKVRVSLISFFNPLENPLGFFQTGFVFIFQK

SEQ ID NO: 10607 - DNA, 648 bp, Streptococcus agalactiae
atgtcatattttagaaattactggtatcgttttggagcaattttatttattattttagcagtaatattgcttgtttttagacctgactggtcaatgcttcactatctattgtatttttactttatggcacttctagcgcatcaatttgaagaatatcagtttcccggtggggcatcacctatcattaactatgttgtttatgatgaagaagagctgatggattgttttccaggcaatactcagtctattatgttggttaatactattgcttggttgctttacattgctagtattgcttttcctcaagcttattggcttggattaggagtcatgttctttagtctaacgcagctcttgggtcatggttttcagatgaatattaaacttaaaacttggtataatcctggtctagcaacgacagtatttctcctagtaccaatagcttgcgtatacatctatcaagctagtgcagaaggaatgctcacttggggagattggctaggtggttttatcatgttgattgtctgtgtactaactagcattattgcacctgtacagctattgaaggataaggagaccaattatattattagtccttggcaaatggaccgttttcataaggtcgttaattttgtaaggataaaaaaa

SEQ ID NO: 10608 - protein, 216 aa, Streptococcus agalactiae
MSYFRNYWYRFGAILFIILAVILLVFRPDWSMLHYLLYFYFMALLAHQFEEYQFPGGASPIINYVVYDEEELMDCFPGNTQSIMLVNTIAWLLYIASIAFPQAYWLGLGVMFFSLTQLLGHGFQMNIKLKTWYNPGLATTVFLLVPIACVYIYQASAEGMLTWGDWLGGFIMLIVCVLTSIIAPVQLLKDKETNYIISPWQMDRFHKVVNFVRIKK

SEQ ID NO: 10609 - DNA, 501 bp, Streptococcus agalactiae
atgaaagcattgataacaaaatggtacctcttttgtccctatcttgcttctctttttgccttagcattattttttggaaattgggatttacgagtgcagtcactacttatttcgggactttttattcaattacactttttcgaagaatttggtttccctggaggttttccgcttatcactatgctagttgaacttaaatcggttgaaactgatactagtaagtgggacttaaaccatctatcagcctttttcgggaatcagtggtttgcagtgattgtttatcttttgccgattttttgtcccaatataccatttttaacacttgcagtcatgatttttgcatttgcagaacttgccatgcatcttttcttttttaatctttccttgaagaagtggtataatccaggacttcttacgaccttagtaggtcttgtccctgtttctgtctattatttagctcatgattggaagttgtattctggacttgattggtttttaggc

SEQ ID NO: 10610 - protein, 167 aa, Streptococcus agalactiae
MKALITKWYLFCPYLASLFALALFFGNWDLRVQSLLISGLFIQLHFFEEFGFPGGFPLITMLVELKSVETDTSKWDLNHLSAFFGNQWFAVIVYLLPIFCPNIPFLTLAVMIFAFAELAMHLFFFNLSLKKWYNPGLLTTLVGLVPVSVYYLAHDWKLYSGLDWFLG

SEQ ID NO: 10611 - DNA, 90 bp, Streptococcus agalactiae
gtgcataaaacctccaaaggtattgatattataggttcacttgattatactatatggtatcaaatgtcacaaatcttggaggtcatctta

SEQ ID NO: 10612 - protein, 30 aa, Streptococcus agalactiae
MHKTSKGIDIIGSLDYTIWYQMSQILEVIL

SEQ ID NO: 10613 - DNA, 168 bp, Streptococcus agalactiae
atgcaacgtagcctttttggggtctttaccgcatttttagctgtgatttgtgttttatgtgcaattcctgctataaagaaaaaaagatatggattaggaacagtttttttgatgaatgctttcactaaccttgtcaacacaatccatgccttttatggaacattattt

SEQ ID NO: 10614 - protein, 56 aa, Streptococcus agalactiae
MQRSLFGVFTAFLAVICVLCAIPAIKKKRYGLGTVFLMNAFTNLVNTIHAFYGTLF

SEQ ID NO: 10615 - DNA, 216 bp, Streptococcus agalactiae
atgattaaactgtattataaagatgcttacgacactgaacgatgccaagtttttgaaaatccaaatgattttattcgagttttaatgggatgtgttactgttcctgacaattatcctattacgaaaatgacttataaagataaagatattgcttacagtggtacttatggagatctcttcaagacttttattgaatttgattggtccactttggac

SEQ ID NO: 10616 - protein, 72 aa, Streptococcus agalactiae
MIKLYYKDAYDTERCQVFENPNDFIRVLMGCVTVPDNYPITKMTYKDKDIAYSGTYGDLFKTFIEFDWSTLD

SEQ ID NO: 10617 - DNA, 129 bp, Streptococcus agalactiae
gtgctagttgcactcctattagtggaagtaggagttgaattgttagaagtgaccaagtttgcatctgtggccgttacacctgttggagttgttgcagatgtaacactagttgtctcatctgcaagtacc

SEQ ID NO: 10618 - protein, 43 aa, Streptococcus agalactiae
MLVALLLVEVGVELLEVTKFASVAVTPVGVVADVTLVVSSAST

SEQ ID NO: 10619 - DNA, 492 bp, Streptococcus agalactiae
atgattaaatggaatgaaaaagaaacaaaactagttgatacaagtttttcaattatgttgtatctaaaaacgctatttgcagtcggacaagtagtagctggcgttttattatattattttaaacctacacaaataaaacatctcctatttcttttaactgaaggtgaagttcacggtgggattcatggttttatttctgctcatttcttgaaaataagcagttatattaatgattcggctagtcatttagccgctatctatctattaattcatggcggtatcaaattagtagcacttattttattacataaagagaaattatttgcttaccctttatcaattttagttttcgttgggtttatcattttccaactaagggaatatttttctagtcatagcattttaatgatttttctatgtgtatttgatgttatcatgataattttaacatggttagaatatcagaaaatgaaattgaatttttcaaaaagg

SEQ ID NO: 10620 - protein, 164 aa, Streptococcus agalactiae
MIKWNEKETKLVDTSFSIMLYLKTLFAVGQVVAGVLLYYFKPTQIKHLLFLLTEGEVHGGIHGFISAHFLKISSYINDSASHLAAIYLLIHGGIKLVALILLHKEKLFAYPLSILVFVGFIIFQLREYFSSHSILMIFLCVFDVIMIILTWLEYQKMKLNFSKR

SEQ ID NO: 10621 - DNA, 99 bp, Streptococcus agalactiae
ttgattccaaaagacattgctttcttaaccaaagctcgtcctgtcttagagaatgaagatagtaacgtttcagaagtgacaccttctaaatttttaaca

SEQ ID NO: 10622 - protein, 33 aa, Streptococcus agalactiae
MIPKDIAFLTKARPVLENEDSNVSEVTPSKFLT

SEQ ID NO: 10623 - DNA, 171 bp, Streptococcus agalactiae
ttgaataatgactctgccacgctaaaaactcttgaaatagctcatgatttttatctaagcaaagggggtaaatcaaactatcttcatgtgtatttatataccccacaagcgtctcaagattttcaaattgtgcatcataatggtgaatcacatggtttagctccttcgaga

SEQ ID NO: 10624 - protein, 57 aa, Streptococcus agalactiae
MNNDSATLKTLEIAHDFYLSKGGKSNYLHVYLYTPQASQDFQIVHHNGESHGLAPSR

SEQ ID NO: 10625 - DNA, 180 bp, Streptococcus agalactiae
ttggcagcagaatttgaactgctactcggagtactactagcagaggaattttctagtgtttggctggatgatgcccttgtctcatctttttcagtagaaacttggttactagaattttgtccactttctcttataatgacggtttttgaagtagaagaatcagtcttactagagtctttg

SEQ ID NO: 10626 - protein, 60 aa, Streptococcus agalactiae
MAAEFELLLGVLLAEEFSSVWLDDALVSSFSVETWLLEFCPLSLIMTVFEVEESVLLESL

SEQ ID NO: 10627 - DNA, 198 bp, Streptococcus agalactiae
atgccaaaacaaaaaacacaccgcgcatcagctaaacgctttaaacgcacaggttcaggtggattgaaacgcttccgcgcgtttacttcacaccgtttccacggtaaaactaaaaaacaacgtcgtcatcttcgtaaagctactatggtttcatcaggagatttcaaacgtattaaagcaatgcttactcgccttaaa

SEQ ID NO: 10628 - protein, 66 aa, Streptococcus agalactiae
MPKQKTHRASAKRFKRTGSGGLKRFRAFTSHRFHGKTKKQRRHLRKATMVSSGDFKRIKAMLTRLK

SEQ ID NO: 10629 - DNA, 681 bp, Streptococcus agalactiae
atgaactcaattaatattgctattgatggaccagcatcaagtggaaaaagtactgtcgctaagattattgctaaaaatttgaattacacttaccttgatacaggtgctatgtatcgttgtgctacttatctggctttacagcatggatatgaagcacaagatgtttcgaaaattctaggactcctagctgaaagaccaatttcttttggtaaagcagaagatggcagccagacagtctttcttggcacagaagaagttactttagctatccgtcaaaacgatgttactaacaatgtctcgtgggtttctgctatcccagagattcgagaagagttagtaaaccagcagcgtcgtatagccaaagatggtgctattataatggatggtcgtgacataggaacagttgttttgccagatgcagaattgaagatttttttagtggcttctgttgatgaaagagctgagcgtcgctttaaagaaaatcaagaaaaaggcattgagagtgattttgaaacactgaaatcagaaattgctgctcgtgattataaagatagccatcgagaagtttcaccattaaaggcagcagaagatgctattgaatttgatactacaggagtatcaattgaaggtgttgtaacttttattcaagaaaaagcagaaaaaataattgacatgaagaat

SEQ ID NO: 10630 - protein, 227 aa, Streptococcus agalactiae
MNSINIAIDGPASSGKSTVAKIIAKNLNYTYLDTGAMYRCATYLALQHGYEAQDVSKILGLLAERPISFGKAEDGSQTVFLGTEEVTLAIRQNDVTNNVSWVSAIPEIREELVNQQRRIAKDGAIIMDGRDIGTVVLPDAELKIFLVASVDERAERRFKENQEKGIESDFETLKSEIAARDYKDSHREVSPLKAAEDAIEFDTTGVSIEGVVTFIQEKAEKIIDMKN

SEQ ID NO: 10631 - DNA, 501 bp, Streptococcus agalactiae
atggttcagggttcaattaatattgaaaaatataaagatttggcgctccaaaaacaaggcgagcatcgtaaatttttagcaagtttaaaaaagaaagctcctaaaaacttagataaaatagtccaacagatacatcaagaggtttttcaagaaattgattgtacagcatgtgctaattgttgtaaaactttgggtcctctatttacagaagctgatatttctaggatttctaaacatttccggatgaagttatcggcttttgaagatttatttttagaagtagatgaagatggagataaagtatttaaagcgatgccttgtccgtttttaggcgatgataacttatgtagtatatacgatgtcagacctaaagcttgtcgtgaatttccacatactgatcgtaagaaaatctatcaaattaataacttaacgataaaaaatactcttacttgtccagcggcatacctttttgtggaaaaattgaaatcacgtatagggaaa

SEQ ID NO: 10632 - protein, 167 aa, Streptococcus agalactiae
MVQGSINIEKYKDLALQKQGEHRKFLASLKKKAPKNLDKIVQQIHQEVFQEIDCTACANCCKTLGPLFTEADISRISKHFRMKLSAFEDLFLEVDEDGDKVFKAMPCPFLGDDNLCSIYDVRPKACREFPHTDRKKIYQINNLTIKNTLTCPAAYLFVEKLKSRIGK

SEQ ID NO: 10633 - DNA, 804 bp, Streptococcus agalactiae
atgtcaaaaaaaataatattaggaattttatctcttttatctgtcgttactttggtggcgtgtggttcatcagacaaacagctacaagataaagttgagaaaaaagggaagttagttttagcggtgagtccagattatgctccctttgagtttaaagcgcttgttaatgggaaagataaagttgtcggcgcagatattgagttagctcaagctattgctgatgagcttcatgtcaaactagaggtatctcctatgagttttgacaatgttttatcaagtttacaaacaggtaaggctgatatggctatttctggattatcatatactaaagagcgtgctaaagtctatgatttttcaaaaccttattacactacagaaaatgcggttcttgttaggaagtctgatttaggaaaatatacttcaatcgaaagccttaaaggtaaaaaaatagcagtacaaaaaggaagtatcgaagagggagtttctaagaaatcattcaaaaattctcacgtcgtgtcactgacagcgatgggagaagcgattagtgagttaaaatcaggcaaggtagaagctgttgatttagaaaaaaccgtagctgaaggttacttggcccagaatccagaccttgttcttgctaagtttgcccttaaaacaggagaaggggatgctaaggctgtagctttacctaaagacagtggaaaaatgttgaagactgttaacaaagtgataaagagacttgaaaaagaagataaatataaagtttatatttcagatgcggctaaattaactggcaatcaagttgaa

SEQ ID NO: 10634 - protein, 268 aa, Streptococcus agalactiae
MSKKIILGILSLLSVVTLVACGSSDKQLQDKVEKKGKLVLAVSPDYAPFEFKALVNGKDKVVGADIELAQAIADELHVKLEVSPMSFDNVLSSLQTGKADMAISGLSYTKERAKVYDFSKPYYTTENAVLVRKSDLGKYTSIESLKGKKIAVQKGSIEEGVSKKSFKNSHVVSLTAMGEAISELKSGKVEAVDLEKTVAEGYLAQNPDLVLAKFALKTGEGDAKAVALPKDSGKMLKTVNKVIKRLEKEDKYKVYISDAAKLTGNQVE

SEQ ID NO: 10635 - DNA, 243 bp, Streptococcus agalactiae
atgaagcattggtacacagatgaaggcatccgctatttggtattcctttataaaacatatgatttttcaggtgaattacaatcgtcagatgaaggtgatgttgtatggattgaacgttcacaacttgataagattgaactagcatatgatatgcttaactttttgagagtatttgacgaagatgacatctcagagatgttttatagtaagcgacttgaagatggttttataagaaaattttat

SEQ ID NO: 10636 - protein, 81 aa, Streptococcus agalactiae
MKHWYTDEGIRYLVFLYKTYDFSGELQSSDEGDVVWIERSQLDKIELAYDMLNFLRVFDEDDISEMFYSKRLEDGFIRKFY

SEQ ID NO: 10637 - DNA, 186 bp, Streptococcus agalactiae
ttgaaaaaaaagaatttacttcaggagagtattaataaacgtctatctgaagagcgatatcaaattcctaaagaaaaaagagagaaaaaacgatttgacatgcagcttattctgattatttctattttaatagggttaatcatgtctattatcggaattattcgatttttcttaacctacagtagt

SEQ ID NO: 10638 - protein, 62 aa, Streptococcus agalactiae
MKKKNLLQESINKRLSEERYQIPKEKREKKRFDMQLILIISILIGLIMSIIGIIRFFLTYSS

SEQ ID NO: 10639 - DNA, 144 bp, Streptococcus agalactiae
gtgaaagtaaagaagtgtttttcaaatgttggctcaggtaacagatacgtttcaaaattaaacacctcattccaatctagttgctcatattgccaccatgtctccctaaaccttgaagaagaaaaagtattccatggtttatca

SEQ ID NO: 10640 - protein, 48 aa, Streptococcus agalactiae
MKVKKCFSNVGSGNRYVSKLNTSFQSSCSYCHHVSLNLEEEKVFHGLS

SEQ ID NO: 10641 - DNA, 372 bp, Streptococcus agalactiae
ttggcagtatctaaaaacatactcatttctaaaattcctattctttattctattcagtataaaaaaacgctttacagcgtttctcattacatgattgcactaatagcaccaaataccaaaccaccaactgttactagtaccatcaaaataacaacaaaaagagttagtttttcaaacccagttttttttcgttgtccgttatctccaaaagccactcatgtcacctcatttactgaatatatagttaagtctatattaacacgaaacgtcttatttcgcaaactacaaaccgttagcttaaatatatctttattaaatcaatatatctttattaaatcgcttccatatttccttgtgctttataagagttta

SEQ ID NO: 10642 - protein, 124 aa, Streptococcus agalactiae
MAVSKNILISKIPILYSIQYKKTLYSVSHYMIALIAPNTKPPTVTSTIKITTKRVSFSNPVFFRCPLSPKATHVTSFTEYIVKSILTRNVLFRKLQTVSLNISLLNQYIFIKSLPYFLVLYKSL

SEQ ID NO: 10643 - DNA, 291 bp, Streptococcus agalactiae
ttgaatcttaataagttttatgttagaatgtactttgaccatagtggaggaattaacatgtataacctattactcaccattctacttgttttatcagtattattgattatctcaattttcatgcaaccacaaaagaatccaagtagtaatgtttttgatagtagcggttctgaagccctttttgaacgtagtaaagctcgaggatttgaagcttttatgcaacgttttacaggtgttttagtctttttctggctactaatcggcttagtattatctattttatcaagtcat

SEQ ID NO: 10644 - protein, 97 aa, Streptococcus agalactiae
MNLNKFYVRMYFDHSGGINMYNLLLTILLVLSVLLIISIFMQPQKNPSSNVFDSSGSEALFERSKARGFEAFMQRFTGVLVFFWLLIGLVLSILSSH

SEQ ID NO: 10645 - DNA, 174 bp, Streptococcus agalactiae
atgtctaaaaagactgattcaaattatctacattccaattgttctgacaagaaaatttggagcgatgaggcgcctctgcaacaggagactatccctaaagacagagattgtgttatcaaacctgtcattactatgacagttgaacatgtggaaatcccattagatgaccaatct

SEQ ID NO: 10646 - protein, 58 aa, Streptococcus agalactiae
MSKKTDSNYLHSNCSDKKIWSDEAPLQQETIPKDRDCVIKPVITMTVEHVEIPLDDQS

SEQ ID NO: 10647 - DNA, 198 bp, Streptococcus agalactiae
atgatcatgctgttcctaatgattaaaccagattatataaggtatttcaaagtcattgacgatatgcatgataccatgtaccaacagactgtttttcatgttcaactgcaagcttggaaatacaccatgaaatcgattgatcaattagttgtagatgatttgaatcatatcagtaatgagaaaaccactttggttaaa

SEQ ID NO: 10648 - protein, 66 aa, Streptococcus agalactiae
MIMLFLMIKPDYIRYFKVIDDMHDTMYQQTVFHVQLQAWKYTMKSIDQLVVDDLNHISNEKTTLVK

SEQ ID NO: 10649 - DNA, 186 bp, Streptococcus agalactiae
atgagtggtcaaagagctaccagcaccatccagagcgatataaatatctttcatcatatagaagctatttgtataagtaaatctaacagtattgggctccccgcaatacaaaatcacttgggacagctgatccaaagagaacgtctgggtcttttcttctcgataacctattccaaagctcccact

SEQ ID NO: 10650 - protein, 62 aa, Streptococcus agalactiae
MSGQRATSTIQSDINIFHHIEAICISKSNSIGLPAIQNHLGQLIQRERLGLFFSITYSKAPT

SEQ ID NO: 10651 - DNA, 96 bp, Streptococcus agalactiae
atgttaaaagatgttaatgttggaatgagtcatttattagttagaggtgctattattctagtagtagggattgtttttctgttgcaacagattcag

SEQ ID NO: 10652 - protein, 32 aa, Streptococcus agalactiae
MLKDVNVGMSHLLVRGAIILVVGIVFLLQQIQ

SEQ ID NO: 10653 - DNA, 135 bp, Streptococcus agalactiae
gtgattagtctctcaatcttattacttagagtaaatcaagcaaaaatgttagaaaataaaaaatatatgacaaactattccaaacaatatgctcgccaatcgaataatgaatggattttgtatagtggtgcaaac

SEQ ID NO: 10654 - protein, 45 aa, Streptococcus agalactiae
MISLSILLLRVNQAKMLENKKYMTNYSKQYARQSNNEWILYSGAN

SEQ ID NO: 10655 - DNA, 252 bp, Streptococcus agalactiae
ttgtttgtcatgagaacatttgggaactccctgagtggtcccttggttgtgatcttatcttctatactatttagctggtctcacttacatggtctatctgtcgtcgactttgttgtctattttggtatgggtttgattttcgctagtttgcaccactatacaaaatccattcattattcgattggcgagcatattgtttggaatagtttgtcatatattttttattttctaacatttttgcttgatttactc

SEQ ID NO: 10656 - protein, 84 aa, Streptococcus agalactiae
MFVMRTFGNSLSGPLVVILSSILFSWSHLHGLSVVDFVVYFGMGLIFASLHHYTKSIHYSIGEHIVWNSLSYIFYFLTFLLDLL

SEQ ID NO: 10657 - DNA, 330 bp, Streptococcus agalactiae
ttgcttgggcattgggtgattagtttactatcaatagggttagagtggagttggagtatatggattggcattaatcttataatgatgattctgttgagttatgtgctaacaaaaactgagccaatcagtaactaccaagagtcatcatctaacctcaaaaaatggctatttgcaataggtgcttttagcgttttattttgctgggcactactagtaaaaacatttttcccaataaggcaaaaccaggagggattaatagctgatatgaatcaggtcaatcactactttcgagttgtcttattattgactatctgtcttattgccccaatt

SEQ ID NO: 10658 - protein, 110 aa, Streptococcus agalactiae
MLGHWVISLLSIGLEWSWSIWIGINLIMMILLSYVLTKTEPISNYQESSSNLKKWLFAIGAFSVLFCWALLVKTFFPIRQNQEGLIADMNQVNHYFRVVLLLTICLIAPI

SEQ ID NO: 10659 - DNA, 114 bp, Streptococcus agalactiae
atgggaaatactaggtgtgactttaaagaacttctaacttttattgatatgttgttaggcattcttgtagaaacaaatgttaagaaaataaggagttctcatttgtatatttta

SEQ ID NO: 10660 - protein, 38 aa, Streptococcus agalactiae
MGNTRCDFKELLTFIDMLLGILVETNVKKIRSSHLYIL

SEQ ID NO: 10661 - DNA, 96 bp, Streptococcus agalactiae
atgtttgtaatgggtgtccaaagaggaggatcaactgtggttacaagaagaccttctatcttgctaagcaagctcaaagaaactatgaaaaacttt

SEQ ID NO: 10662 - protein, 32 aa, Streptococcus agalactiae
MFVMGVQRGGSTVVTRRPSILLSKLKETMKNF

SEQ ID NO: 10663 - DNA, 159 bp, Streptococcus agalactiae
ttgcaatggtattcaaaagagctgaaattaaaaattttaaggaaattggaagtatcttacttctttattccaatagctaaatcggagattataaaaggttgccaaatttttctttggcaacctttttatattattacttataaatcatggaaactagca

SEQ ID NO: 10664 - protein, 53 aa, Streptococcus agalactiae
MQWYSKELKLKILRKLEVSYFFIPIAKSEIIKGCQIFLWQPFYIITYKSWKLA

SEQ ID NO: 10665 - DNA, 243 bp, Streptococcus agalactiae
ttgaataaacaagagcgtttaggaatgagcgtttatctttactataatcgtgacgctcgtaaattatataaatacggagatgttcattatcattctcgtagattaagatatctagtcatttatgttaataaagaggatattgttagcgttagtaaagagataaaacatttaaaatttgttaaggatgttcggttatcagcaattgatgatattgatcaggattttgttggaaacttatatcgt

SEQ ID NO: 10666 - protein, 81 aa, Streptococcus agalactiae
MNKQERLGMSVYLYYNRDARKLYKYGDVHYHSRRLRYLVIYVNKEDIVSVSKEIKHLKFVKDVRLSAIDDIDQDFVGNLYR

SEQ ID NO: 10667 - DNA, 111 bp, Streptococcus agalactiae
atgatctggaaaatggaccaaatttctaacagtttattctcaataggtgttcccgataatgcaaaacagtttttgacctcaaaagatctcaagctatgggctattttagtt

SEQ ID NO: 10668 - protein, 37 aa, Streptococcus agalactiae
MIWKMDQISNSLFSIGVPDNAKQFLTSKDLKLWAILV

SEQ ID NO: 10669 - DNA, 111 bp, Streptococcus agalactiae
atgattattgaaaaccctaacaaagcggacaaacaagaaaatctgtccattccagaaaaggcttacaaattttataataaaagagaattaaacataaaaggagtttccaaa

SEQ ID NO: 10670 - protein, 37 aa, Streptococcus agalactiae
MIIENPNKADKQENLSIPEKAYKFYNKRELNIKGVSK

SEQ ID NO: 10671 - DNA, 114 bp, Streptococcus agalactiae
gtgcttcagtcttatttacgccctcttggtgattttatttatttatcaagaaatcagacacataccaaatcaataaactatttgagaaagcaggttatttgtgataaaatgagt

SEQ ID NO: 10672 - protein, 38 aa, Streptococcus agalactiae
MLQSYLRPLGDFIYLSRNQTHTKSINYLRKQVICDKMS

SEQ ID NO: 10673 - DNA, 90 bp, Streptococcus agalactiae
atggggaatggcattgtgggacgaaaacttttcaaacttatttttatttggatttattttttcaaacagtttattttttataaagttcat

SEQ ID NO: 10674 - protein, 30 aa, Streptococcus agalactiae
MGNGIVGRKLFKLIFIWIYFFKQFIFYKVH

SEQ ID NO: 10675 - DNA, 228 bp, Streptococcus agalactiae
atgggaataaaaagttatagacgggttgagcttgtagcaaaacttaattttagatattatctagttagtattagtggacgttattacattattgattatgccaatcctagtgatataaaagattattttataggtatttttccagaaagagtagaaaaatatcaaatttatgatgtgactgcggattataagaattttttagtaaacaaaaaaagtcgcctttatctt

SEQ ID NO: 10676 - protein, 76 aa, Streptococcus agalactiae
MGIKSYRRVELVAKLNFRYYLVSISGRYYIIDYANPSDIKDYFIGIFPERVEKYQIYDVTADYKNFLVNKKSRLYL

SEQ ID NO: 10677 - DNA, 123 bp, Streptococcus agalactiae
ttgaaaacggaaatagaaacaaataatcttattaatttaggatggtttcatgataatgctgtttattatgatatgaaaacgaaaaaattatataaatctaatctaaaaaaaatagcacaggta

SEQ ID NO: 10678 - protein, 41 aa, Streptococcus agalactiae
MKTEIETNNLINLGWFHDNAVYYDMKTKKLYKSNLKKIAQV

SEQ ID NO: 10679 - DNA, 237 bp, Streptococcus agalactiae
atggctcaacaacgtcgtggcggattcaaacgccgtaaaaaagttgattatatcgcagctaacaagattgaatatgttgattacaaagatacagagcttcttagccgtttcgtttcagaacgtggaaaaattttaccacgtcgtgtaacaggaacttcagctaaaaaccaacgtaaagtaacaacagcaatcaaacgtgctcgtgttatggctcttatgccttacgtaaatgaagat

SEQ ID NO: 10680 - protein, 79 aa, Streptococcus agalactiae
MAQQRRGGFKRRKKVDYIAANKIEYVDYKDTELLSRFVSERGKILPRRVTGTSAKNQRKVTTAIKRARVMALMPYVNED

SEQ ID NO: 10681 - DNA, 489 bp, Streptococcus agalactiae
atgattaataatgtagtacttgtaggtcgcatgacccgtgatgcagaacttcgttatacaccaagtaatcaagcggtagccactttttcacttgcagttaatcgtaattttaaaaatcaatctggcgaacgtgaggctgattttattaactgtgttatttggcgccaacaagctgaaaacttggctaactgggcaaaaaaaggtgctttggttggaattacaggtcgtatccaaacgcgtaattatgaaaaccaacaaggtcaacgtgtctatgtaacagaagttgttgcggaaagtttccaattattggaaagtcgtgctacacgagaaggtggttcacctaactcttataataacggtggctataacaatgctccgtcaaataatagttattcagcttcttctcaacaaacacctaattttagtcgtgatgagagtccgtttggtaactcaaatccaatggatatttcagatgatgatctaccattc

SEQ ID NO: 10682 - protein, 163 aa, Streptococcus agalactiae
MINNVVLVGRMTRDAELRYTPSNQAVATFSLAVNRNFKNQSGEREADFINCVIWRQQAENLANWAKKGALVGITGRIQTRNYENQQGQRVYVTEVVAESFQLLESRATREGGSPNSYNNGGYNNAPSNNSYSASSQQTPNFSRDESPFGNSNPMDISDDDLPF

SEQ ID NO: 10683 - DNA, 357 bp, Streptococcus agalactiae
atgaaacttctcactaaagaacggtttgatgattctcaacacttttggtaccagatcaatttattacaagagagtaacttcggagcagtttttgaccatgataataaaaacattccacaggttgttgcaactattgttgatgatttacaaggttccggaagttcgaattatttctggtattttggcaatactactgatacttccatccttatgattgctcatttaaatcgaaaattctatattcaggttaatttaaaggactttgactttgcactcaatttaatagctataaataattggaagagtctcctccaaactcaactcgaagctctaaacgataccctagcaatatttcaa

SEQ ID NO: 10684 - protein, 119 aa, Streptococcus agalactiae
MKLLTKERFDDSQHFWYQINLLQESNFGAVFDHDNKNIPQVVATIVDDLQGSGSSNYFWYFGNTTDTSILMIAHLNRKFYIQVNLKDFDFALNLIAINNWKSLLQTQLEALNDTLAIFQ

SEQ ID NO: 10685 - DNA, 123 bp, Streptococcus agalactiae
atgacattaatcagtctccctcgcgttgctttgtcactccattctaccttatttattgaaatattgctagggtatcgtttagagcttcgagttgagtttggaggagactcttccaattattta

SEQ ID NO: 10686 - protein, 41 aa, Streptococcus agalactiae
MTLISLPRVALSLHSTLFIEILLGYRLELRVEFGGDSSNYL

SEQ ID NO: 10687 - DNA, 102 bp, Streptococcus agalactiae
ttgttgttatacttagttcataaaataaataacccaaaagaaagaggtaattcttatgaacaaacttattacagaaaaaaaagtcaacaacgtctcaactgc

SEQ ID NO: 10688 - protein, 34 aa, Streptococcus agalactiae
MLLYLVHKINNPKERGNSYEQTYYRKKSQQRLNC

SEQ ID NO: 10689 - DNA, 105 bp, Streptococcus agalactiae
atgcttgttttattaagtgtttatactaaagataatggtatgggatatcaagaagaattatgtatgcataaaaggttaaaatggttagtggcagctatgtgttta

SEQ ID NO: 10690 - protein, 35 aa, Streptococcus agalactiae
MLVLLSVYTKDNGMGYQEELCMHKRLKWLVAAMCL

SEQ ID NO: 10691 - DNA, 1008 bp, Streptococcus agalactiae
atggtagttaaagttggtattaacggtttcggtcgtatcggtcgtcttgcattccgtcgcatccaaaacgtagaaggtgttgaagttactcgtatcaacgaccttacagatccaaacatgcttgcacacttgttgaaatatgacacaactcaaggtcgtttcgacggtactgttgaagttaaagaaggtggattcgaagttaacggtcaatttgttaaagtttctgctgaacgcgaaccagcaaacattgactgggctactgatggcgtagaaatcgttcttgaagcaactggtttctttgcatcaaaagaaaaagctgaacaacacatccatgaaaatggtgctaaaaaagttgttatcacagctcctggtggaaacgacgttaaaacagttgttttcaacactaaccacgatatccttgatggaactgaaacagttatctcaggtgcttcatgtactacaaactgtcttgctccaatggctaaagctttacaagacaactttggtgttaaacaaggtttgatgactactatccacgcatacactggtgaccaaatgatccttgacggaccacaccgtggtggtgaccttcgtcgtgctcgtgcaggtgctgcaaacatcgttcctaactcaactggtgctgcaaaagctatcggacttgttatcccagaattgaacggtaaacttgatggtgctgcacaacgtgttcctgttccaactggatcagtaactgaattggttgcaactcttgaaaaagacgtaactgtcgaagaagtaaatgcagctatgaaagcagcagctaacgattcatacggttatactgaagatccaatcgtatcatctgatatcgttggtatttcatacggttcattgtttgatgctactcaaactaaagttcaaactgttgacggtaaccaattggttaaagttgtttcatggtacgataacgaaatgtcatacacttcacaacttgttcgtacacttgaatactttgcaaaaattgcaaaa

SEQ ID NO: 10692 - protein, 336 aa, Streptococcus agalactiae
MVVKVGINGFGRIGRLAFRRIQNVEGVEVTRINDLTDPNMLAHLLKYDTTQGRFDGTVEVKEGGFEVNGQFVKVSAEREPANIDWATDGVEIVLEATGFFASKEKAEQHIHENGAKKVVITAPGGNDVKTVVFNTNHDILDGTETVISGASCTTNCLAPMAKALQDNFGVKQGLMTTIHAYTGDQMILDGPHRGGDLRRARAGAANIVPNSTGAAKAIGLVIPELNGKLDGAAQRVPVPTGSVTELVATLEKDVTVEEVNAAMKAAANDSYGYTEDPIVSSDIVGISYGSLFDATQTKVQTVDGNQLVKVVSWYDNEMSYTSQLVRTLEYFAKIAK

SEQ ID NO: 10693 - DNA, 2076 bp, Streptococcus agalactiae
atggctcgcgaattttcacttgaaaaaactcgtaatatcggtatcatggctcacgtcgatgctggtaaaacaacaacaactgagcgtattctttactatactggtaaaatccacaaaatcggtgaaacacacgaaggtgcttcacaaatggactggatggaacaagaacaagaacgtggtatcacaattacatcagctgcaacaacagcacaatgggatggtcaccgtgttaacatcatcgatacaccaggacacgtggacttcacaattgaagttcaacgttcacttcgcgtacttgatggtgcggtaacagttcttgatgctcaatcaggtgtagaacctcaaactgaaacagtttggcgtcaagcaacagaatacggagttccacgtatcgtttttgctaataaaatggataaaatcggtgctgacttcctctattcagtacaatcacttcatgaccgtcttcaagcgaatgcacacccaattcaattgccaattggttcagaagacgatttccgtggtattattgacttaatcaaaatgaaagctgaaatctatactaatgaccttggtacagatatccttgaagaagatattccagcagagtatgttgatcaagcaaatgaatatcgtgaaaaattagtagaagcagttgctgatactgatgaagatttgatgatgaaataccttgaaggtgaagaaatcactaacgaagagttgatggctgctattcgtaaagcaactatcaatgttgaattctaccctgtattgtgtggttcagccttcaagaataaaggtgttcaattgatgcttgatgctgttattgattaccttccaagcccacttgatattcctgcaatcaaaggtattaaccctgatactgacgaagaagaaacacgtcctgcttcagatgaagagccatttgcagcgcttgccttcaagatcatgacagatcctttcgtgggtcgcttaacattcttccgtgtgtactcaggtgttcttaattcaggttcatacgtgttgaatacatctaaaggtaaacgtgaacgtatcggacgtatcttacaaatgcacgcaaatagtcgtcaagaaattgaaactgtttatgctggggatatcgcagcggctgttggtttgaaagatacaactacaggtgattcattgactgatgaaaaatcaaaagttattcttgaatcaattgaagttccagaaccagttatccaattgatggttgagccaaaatctaaagctgaccaagataaaatgggtatcgcccttcaaaaacttgctgaagaagatccaacgttccgcgttgaaactaacgttgaaactggtgaaacagttatctcaggaatgggtgaacttcaccttgatgtccttgttgaccgtatgaaacgtgaattcaaagttgaagcaaacgttggtgcacctcaagtatcataccgcgaaacattccgcgcttctacacaagcacgtggattcttcaaacgccaatctggtggtaaaggtcaatttggtgatgtttggattgaatttacaccaaacgaagaaggtaaaggattcgaattcgaaaatgctatcgtcggtggtgtggttcctcgtgaatttattccagccgttgaaaaaggacttgtagaatctatggcaaacggtgttcttgctggatatccaatggttgacgtaaaagctaaactttacgatggttcataccatgatgttgactcatctgagacagccttcaagattgctgcatcacttgcacttaaagaagctgctaaatcagcgcaaccagctatccttgagccaatgatgcttgttacaattacagctccagaagacaatcttggtgacgttatgggtcacgtgactgcacgtcgcggtcgtgttgatggtatggaagcacgtggtaatacacaagttgttcgtgcctttgttccacttgctgaaatgtttggttatgcaacagttcttcgttctgcaacacaaggacgtggcacattcatgatggtatttgaccactacgaagatgttcctaagtcagttcaagaagaaatcatcaagaaaaactctggtgaa

SEQ ID NO: 10694 - protein, 692 aa, Streptococcus agalactiae
MAREFSLEKTRNIGIMAHVDAGKTTTTERILYYTGKIHKIGETHEGASQMDWMEQEQERGITITSAATTAQWDGHRVNIIDTPGHVDFTIEVQRSLRVLDGAVTVLDAQSGVEPQTETVWRQATEYGVPRIVFANKMDKIGADFLYSVQSLHDRLQANAHPIQLPIGSEDDFRGIIDLIKMKAEIYTNDLGTDILEEDIPAEYVDQANEYREKLVEAVADTDEDLMMKYLEGEEITNEELMAAIRKATINVEFYPVLCGSAFKNKGVQLMLDAVIDYLPSPLDIPAIKGINPDTDEEETRPASDEEPFAALAFKIMTDPFVGRLTFFRVYSGVLNSGSYVLNTSKGKRERIGRILQMHANSRQEIETVYAGDIAAAVGLKDTTTGDSLTDEKSKVILESIEVPEPVIQLMVEPKSKADQDKMGIALQKLAEEDPTFRVETNVETGETVISGMGELHLDVLVDRMKREFKVEANVGAPQVSYRETFRASTQARGFFKRQSGGKGQFGDVWIEFTPNEEGKGFEFENAIVGGVVPREFIPAVEKGLVESMANGVLAGYPMVDVKAKLYDGSYHDVDSSETAFKIAASLALKEAAKSAQPAILEPMMLVTITAPEDNLGDVMGHVTARRGRVDGMEARGNTQVVRAFVPLAEMFGYATVLRSATQGRGTFMMVFDHYEDVPKSVQEEIIKKNSGE

SEQ ID NO: 10695 - DNA, 468 bp, Streptococcus agalactiae
atgagtcgtaaaaatcaagcgcctaaacgcgaagtattgccagatccattgtataactcaaaaatcgttacacgtcttatcaaccgtgtaatgcttgatggtaaacgtggtactgctgcaactatcgtatatgatgcttttgaagcaattaaagaagctactggaacagatgctcttgaagtgttcgaaacagctatggaaaacatcatgcctgtccttgaggtacgtgcacgccgtgttggtggatcaaactaccaagttcctgtcgaagttcgtccagaacgtcgtacaactttaggacttcgttggttggttaacgcatcacgtgctcgtggtgaacacactatgaaagatcgtcttgcaaaagaaatcatggatgctgcaaacaacacaggagcatcagttaagaaacgtgaagatactcacaaaatggctgaagctaaccgtgcctttgcacacttccgttgg

SEQ ID NO: 10696 - protein, 156 aa, Streptococcus agalactiae
MSRKNQAPKREVLPDPLYNSKIVTRLINRVMLDGKRGTAATIVYDAFEAIKEATGTDALEVFETAMENIMPVLEVRARRVGGSNYQVPVEVRPERRTTLGLRWLVNASRARGEHTMKDRLAKEIMDAANNTGASVKKREDTHKMAEANRAFAHFRW

SEQ ID NO: 10697 - DNA, 93 bp, Streptococcus agalactiae
atggtatgtttagtaactgatcaaaatagccggctaaacgaatacgaaaatctatcaggaggtattcaacgtgaaacgtacttatcaaccaag

SEQ ID NO: 10698 - protein, 31 aa, Streptococcus agalactiae
MVCLVTDQNSRLNEYENLSGGIQRETYLSTK

SEQ ID NO: 10699 - DNA, 117 bp, Streptococcus agalactiae
atgtatggtctctttatgtcaacacctttgcttagagatattttaattagcccacaccattattgttatggcattattgaattatttaaagacttattagtattaatattacaactt

SEQ ID NO: 10700 - protein, 39 aa, Streptococcus agalactiae
MYGLFMSTPLLRDILISPHHYCYGIIELFKDLLVLILQL

SEQ ID NO: 10701 - DNA, 471 bp, Streptococcus agalactiae; identical to SEQ ID NO: 9025

SEQ ID NO: 10702 - protein, 157 aa, Streptococcus agalactiae
MGGNEILINKRLRTISLLHYLLALLLLIDIIFTIDFIIHTSTISKNSLSYISYGQGFGWSMILINLIALPICFLVELSAGLLLKLEMHKQHGYYPLERLLMTGNILTVVSLVLLHTLIHNINSLLFLSITVVLLISGKSLSLISIYLLKRKSKHQKV

SEQ ID NO: 10703 - DNA, 489 bp, Streptococcus agalactiae
atgattataagacctgtcctaccctcagatgctaaagaattacttgctatctatgctccctacgttgctgacactacaataacgtttgaatacgatattcctagtatatcggaattcactaatcgtatcaaaaatatcagcaaatctttcccatatttagttgctgaagaaaatgggaaaatattaggttatgcatatgcttcaacttactacgctagagctgcctatgactggacttgcgagctttctatttaccttgataaagatgcacgtagcaaaaaaattggtagccaactatatgatacattggagaaagaattagttaaccaagggtatgttaatctactcgcttgtatcagtttaccaaatgatataagcattgcattccacaaaaaaagaggatttaatcaagtcgcacatttcccaaaaatcggatttaaatttgaacaatggcatgacattgtgtggttacaaaagcgattgaaatct

SEQ ID NO: 10704 - protein, 163 aa, Streptococcus agalactiae
MIIRPVLPSDAKELLAIYAPYVADTTITFEYDIPSISEFTNRIKNISKSFPYLVAEENGKILGYAYASTYYARAAYDWTCELSIYLDKDARSKKIGSQLYDTLEKELVNQGYVNLLACISLPNDISIAFHKKRGFNQVAHFPKIGFKFEQWHDIVWLQKRLKS

SEQ ID NO: 10705 - DNA, 183 bp, Streptococcus agalactiae
atgacagagcgagagcttaagaaaattgctaagaagcaaggttttagtaaaactaactttggcaaagggtcacacgaagtttggaaacatccagacggacggacagtgacgatacctaagccaaaggaaaaagattacagaccaggcacactgaacaacattctcaaagtcttgtatggggag

SEQ ID NO: 10706 - protein, 61 aa, Streptococcus agalactiae
MTERELKKIAKKQGFSKTNFGKGSHEVWKHPDGRTVTIPKPKEKDYRPGTLNNILKVLYGE

SEQ ID NO: 10707 - DNA, 96 bp, Streptococcus agalactiae
gtgtttaccgtccataaggacagagtagagcgtttccgtttcagtcgtgttaaaggttcggctgtccataatatcgctggtaaaggagaaatcacc

SEQ ID NO: 10708 - protein, 32 aa, Streptococcus agalactiae
MFTVHKDRVERFRFSRVKGSAVHNIAGKGEIT

SEQ ID NO: 10709 - DNA, 108 bp, Streptococcus agalactiae
atgacatttggtctagtttcaaccaatacatcacacttaaaagatgatgttttcacaccgtcaatggtaagttcattgatttttgtcatgccattcctcctctcaaat

SEQ ID NO: 10710 - protein, 36 aa, Streptococcus agalactiae
MTFGLVSTNTSHLKDDVFTPSMVSSLIFVMPFLLSN

SEQ ID NO: 10711 - DNA, 210 bp, Streptococcus agalactiae
ttgaccccgttggacactgcatttttcgccccatctattgcattggaaatagtggattttatggaattccaaatattgcttgctgttgaaagtatcccattaaaaattcctgaaatcgtgctactcaaattattaaacaaatttgacccagttgagaccagtccagaccacaaattggaaagagtggaagtgaaacttgaccacagagac

SEQ ID NO: 10712 - protein, 70 aa, Streptococcus agalactiae
MTPLDTAFFAPSIALEIVDFMEFQILLAVESIPLKIPEIVLLKLLNKFDPVETSPDHKLERVEVKLDHRD

SEQ ID NO: 10713 - DNA, 345 bp, Streptococcus agalactiae
atggccaagaaatttttcactagacaagatattcaatctatccttgaaacaaaccctttgaaggctaaggtcttctacatggaacgtgaggagaaatcttctcctgacaatgtcatcttgtattatcggttaacaccaggcagtagcattactgctgatgatagagtgcacatgagaaaagtgactttgcaagttagtcactaccacaagaagaaactagacaacattgaaaatttgatgctgtctaattttatgtgtgagccaaatcaattgaatctaaaacaacctgacactgactatctactgacaacttacagacttgaggtgtttacaaatgggcggtgg

SEQ ID NO: 10714 - protein, 115 aa, Streptococcus agalactiae
MAKKFFTRQDIQSILETNPLKAKVFYMEREEKSSPDNVILYYRLTPGSSITADDRVHMRKVTLQVSHYHKKKLDNIENLMLSNFMCEPNQLNLKQPDTDYLLTTYRLEVFTNGRW

SEQ ID NO: 10715 - DNA, 132 bp, Streptococcus agalactiae
ttgctaggattttccgtccaaacaatcggaaatctacaagaacctatcttcaaagaagtatctcctactggcgtaggaactccatctatttggataacatctacaataagatttcaactgacacagctcagt

SEQ ID NO: 10716 - protein, 44 aa, Streptococcus agalactiae
MLGFSVQTIGNLQEPIFKEVSPTGVGTPSIWITSTIRFQLTQLS

SEQ ID NO: 10717 - DNA, 153 bp, Streptococcus agalactiae
ttggcgtctgctttctttaggtcaaaccttacttttagtaggtcttttctctatgctcttattctaaaactagatttaaaaaaagtcaagagattagctaactttttagttaataatttaaaaaggagggtagatgaatgggaatcggttcaa

SEQ ID NO: 10718 - protein, 51 aa, Streptococcus agalactiae
MASAFFRSNLTFSRSFLYALILKLDLKKVKRLANFLVNNLKRRVDEWESVQ

SEQ ID NO: 10719 - DNA, 183 bp, Streptococcus agalactiae
atggaaagtgatttttatgctgtaactcatgtagggcgacttgtttttgttcttgctcagacagattcacatcaacccctaagaccttggttattggattgtaaaatcccgaactatgccagtcgctggcatcgaacaggcacaattccactccaaactctttacagagttggtctagtttca

SEQ ID NO: 10720 - protein, 61 aa, Streptococcus agalactiae
MESDFYAVTHVGRLVFVLAQTDSHQPLRPWLLDCKIPNYASRWHRTGTIPLQTLYRVGLVS

SEQ ID NO: 10721 - DNA, 177 bp, Streptococcus agalactiae
atgtcatatatttctagtttaatattgattatactttatttatctaaaaaaagacatcagaaagaggtattgtcacttgaaaatctttatggagaagctaagtttactctctttatcacttatcttgctatcaactttttcgacatcaccagccctaccacaaatgatatcttatta

SEQ ID NO: 10722 - protein, 59 aa, Streptococcus agalactiae
MSYISSLILIILYLSKKRHQKEVLSLENLYGEAKFTLFITYLAINFFDITSPTTNDILL

SEQ ID NO: 10723 - DNA, 102 bp, Streptococcus agalactiae
ttgattttttataatgatgtcttttttatctttaagaattataacctagataaatctttgttatatatgttgccaagttttatagaagaagaactctatagt

SEQ ID NO: 10724 - protein, 34 aa, Streptococcus agalactiae
MIFYNDVFFIFKNYNLDKSLLYMLPSFIEEELYS

SEQ ID NO: 10725 - DNA, 102 bp, Streptococcus agalactiae
atgaaagatgttcctagagtacctcctgggaatattttaattatttcgcaaccggcttcaagtgctgttgttacctctgataaggtcatgcaacctggtaaa

SEQ ID NO: 10726 - protein, 34 aa, Streptococcus agalactiae
MKDVPRVPPGNILIISQPASSAVVTSDKVMQPGK

SEQ ID NO: 10727 - DNA, 123 bp, Streptococcus agalactiae
ttggttactattcctactattaatgatgaagaaaaaatcctgaaccctacactcctcttctggattaatcatatgtttgaaagtaattggctgactatttttgacataaaagattctatctac

SEQ ID NO: 10728 - protein, 41 aa, Streptococcus agalactiae
MVTIPTINDEEKILNPTLLFWINHMFESNWLTIFDIKDSIY

SEQ ID NO: 10729 - DNA, 453 bp, Streptococcus agalactiae
atgcctaaattaaccctagtctatatcagtcttagcggcaatactcaaagctttgtcaaacgtcttagtgaacaactgtcaacttggcataactgtcaggtttcgactattaatatcaaggaacaaaatcatcaaacctttcctgttgaccaacctttcgtagcactattacccacttaccttgagggaggaaatggcattgacaatggcgatcaagaaattcttaccattccacttggtgattttatagctgcacacaataatgtcaaaaattgtatcggaattgttggctctggaaatagaaattttaacaatcagtactgtttaactgcaaaacaatactctgaacggtttggatttcctatgttaggagactttgaattgcgaggaacttctagcgacgttgaacgtatcgcaaatattatcgttgaaacattatcgaactttaaagcc

SEQ ID NO: 10730 - protein, 151 aa, Streptococcus agalactiae
MPKLTLVYISLSGNTQSFVKRLSEQLSTWHNCQVSTINIKEQNHQTFPVDQPFVALLPTYLEGGNGIDNGDQEILTIPLGDFIAAHNNVKNCIGIVGSGNRNFNNQYCLTAKQYSERFGFPMLGDFELRGTSSDVERIANIIVETLSNFKA

SEQ ID NO: 10731 - DNA, 288 bp, Streptococcus agalactiae
atgatagattatagccaccatattgaagtttctttagagacagatgaacctaagatagccatgtcttattttacattaaaccataagcaaatttttatcatagaaaattcgatagtcgaggaaagaatagatgcttcacgtttgtttggttatggagcaagtagcaagggagaagatagagggttaggcctttataatgtcatgaaagttattgaccgttatcccaatgcatctattagtacaaatagtgaacaacatactttccgtcagggcttagaaataatcttt

SEQ ID NO: 10732 - protein, 96 aa, Streptococcus agalactiae
MIDYSHHIEVSLETDEPKIAMSYFTLNHKQIFIIENSIVEERIDASRLFGYGASSKGEDRGLGLYNVMKVIDRYPNASISTNSEQHTFRQGLEIIF

SEQ ID NO: 10733 - DNA, 144 bp, Streptococcus agalactiae
ttgatggatttgctaaaatgtggatatacattggatgatatagaaacagccagaccagaggatatggaacgttattatgcccctgaacaaatcagaaaatatggagctttaggaatagaattgaggttattgcatggatatttt

SEQ ID NO: 10734 - protein, 48 aa, Streptococcus agalactiae
MMDLLKCGYTLDDIETARPEDMERYYAPEQIRKYGALGIELRLLHGYF

SEQ ID NO: 10735 - DNA, 381 bp, Streptococcus agalactiae
atgttatctggatacaaatttaaaaaagtcaggagaagagtttctaagcgtagcacacaagttttctttgattttacagaagtagaagttactaaatttattgtcttatctcatttagtggataagacaaagaatttagatgactctattaaagaagtctggggcgactcaaaagctcagtccgaacgagatataaaaaatgaattgaaaatgctatcagaggatttctataaattcttatttgaagcagaagatagtatgtttcagttaaaaaaaaataatcagtctttacagaaacaggttaaggagctgacagagcgattaaacattttagaaaatgagaaggattcaggtatatttaacaaacttaagcgaggtttc

SEQ ID NO: 10736 - protein, 127 aa, Streptococcus agalactiae
MLSGYKFKKVRRRVSKRSTQVFFDFTEVEVTKFIVLSHLVDKTKNLDDSIKEVWGDSKAQSERDIKNELKMLSEDFYKFLFEAEDSMFQLKKNNQSLQKQVKELTERLNILENEKDSGIFNKLKRGF

SEQ ID NO: 10737 - DNA, 108 bp, Streptococcus agalactiae
atgagctttgcaaaagttctaactaagaaaaataaattagacaatgtaaacgatttatggtattttgtaagaaattcaaaaaatagatgggttgctggttcagcccat

SEQ ID NO: 10738 - protein, 36 aa, Streptococcus agalactiae
MSFAKVLTKKNKLDNVNDLWYFVRNSKNRWVAGSAH

SEQ ID NO: 10739 - DNA, 204 bp, Streptococcus agalactiae
atgaatacagaaataccaaatcaattattaccattcctagttccgttgattatgttgcaaggagctttaattatcatttctctagtcaaactaagtaaacttaagatgactaaacacctttcaaagccagtttggtttttggtcattatatttcttaatataattgggccaattgcatttcttattttggaagggaataatgaa

SEQ ID NO: 10740 - protein, 68 aa, Streptococcus agalactiae
MNTEIPNQLLPFLVPLIMLQGALIIISLVKLSKLKMTKHLSKPVWFLVIIFLNIIGPIAFLILEGNNE

SEQ ID NO: 10741 - DNA, 144 bp, Streptococcus agalactiae
atgaattataaaagagcctttcttaagggctcttttataattcattatttttcaatgacaaatattagtgaagttaatttttatttaaccattgttattattaatgctgttttgccacttattaatcaacgaaaaagtttcttc

SEQ ID NO: 10742 - protein, 48 aa, Streptococcus agalactiae
MNYKRAFLKGSFIIHYFSMTNISEVNFYLTIVIINAVLPLINQRKSFF

SEQ ID NO: 10743 - DNA, 300 bp, Streptococcus agalactiae
atgactaaaaagataactgttgtagcattagaaacattgattgcccagcataataatatccatttgatagacgttcgtgaagagcatgagtatcgtggggggcatatttcaggtgcgataaatcttcctttgagtcaactcagtcataagtttgaacagttagataaaaataaggaatattatcttgtttgtcaacgagggggaagatctattagagcatgccaatttcttgagttgaaaggctacaaagtaatcaatgtagatggcggcacagaagcgtggagaggaaatctagaagtg

SEQ ID NO: 10744 - protein, 100 aa, Streptococcus agalactiae
MTKKITVVALETLIAQHNNIHLIDVREEHEYRGGHISGAINLPLSQLSHKFEQLDKNKEYYLVCQRGGRSIRACQFLELKGYKVINVDGGTEAWRGNLEV

SEQ ID NO: 10745 - DNA, 765 bp, Streptococcus agalactiae
atgaacgttaaacatatgatgtatctatctggaactctagtggctggtgcattgttattttcaccagctgtattagaagtacatgctgatcaagtgacaactccacaagtggtaaatcatgtaaacagtaataatcaagcccagcaaatggctcaaaagcttgatcaagatagcattcagttgagaaatatcaaagataatgttcagggaacagattatgaaaaaacggttaatgaggctattactagtgttgaaaaattaaagacttcattgcgtgccaaccctgagacagtttatgatttgaattctattggtagtcgtgtagaagccttaacagatgtgattgaagcaatcactttttcaactcaacatttagcaaataaggttagtcaagcaaatattgatatgggatttgggataactaagctggttattcgcattttagatccatttgcttcagttgattcaattaaagctcaagttaacgatgtaaaggcattagaacaaaaggttttaacttatcctgatttaaaaccaactgatagagctacaatctatacaaaatcaaaacttgataaggaaatctggaatacacgctttactagagataaaaaagtacttaacgtcaaagaatttaaagtttacaatactttaaataaagcaatcacacatgctgttggagttcagttgaatccaaatgttacggtacaacaagttgatcaagagattgtaacattacaagcagcacttcaaacagcattaaaa

SEQ ID NO: 10746 - protein, 255 aa, Streptococcus agalactiae
MNVKHMMYLSGTLVAGALLFSPAVLEVHADQVTTPQVVNHVNSNNQAQQMAQKLDQDSIQLRNIKDNVQGTDYEKTVNEAITSVEKLKTSLRANPETVYDLNSIGSRVEALTDVIEAITFSTQHLANKVSQANIDMGFGITKLVIRILDPFASVDSIKAQVNDVKALEQKVLTYPDLKPTDRATIYTKSKLDKEIWNTRFTRDKKVLNVKEFKVYNTLNKAITHAVGVQLNPNVTVQQVDQEIVTLQAALQTALK

SEQ ID NO: 10747 - DNA, 186 bp, Streptococcus agalactiae
atggtttttgggcataatggaacgattttatctaaaatagtacgcttcttattaaatttattttttaagaaaaacattaggctaatctatttgataaaaatagtgataagtagaaattttctaaaatatttagatttatataaggtggtaaattatcgttatggttttttacatgaaaatataaat

SEQ ID NO: 10748 - protein, 62 aa, Streptococcus agalactiae
MVFGHNGTILSKIVRFLLNLFFKKNIRLIYLIKIVISRNFLKYLDLYKVVNYRYGFLHENIN

SEQ ID NO: 10749 - DNA, 321 bp, Streptococcus agalactiae
atgataaatagtaccgtttttcttgctattcttttaggttttgttgtttcttgggtgccaagagtcgctccattcatatttgtaaaatacaaagggctaccaaatagtcttgtgaaatttttaaaatttcttcctctttctattttatttgccctaacattctctagctttttttcagttaaattaggacaattgccaacactaaaatggttagatttattggctggcataccaactctagttgtcactattcgatatcgaaatttattttacactgttcttactggtatcgttactatggctttattgagattactattt

SEQ ID NO: 10750 - protein, 107 aa, Streptococcus agalactiae
MINSTVFLAILLGFVVSWVPRVAPFIFVKYKGLPNSLVKFLKFLPLSILFALTFSSFFSVKLGQLPTLKWLDLLAGIPTLVVTIRYRNLFYTVLTGIVTMALLRLLF

SEQ ID NO: 10751 - DNA, 99 bp, Streptococcus agalactiae
atgctaaaaaaacagtacgagctgactgatttagctaaaaatagaaaaatcccaaaagttaaacttttgggattttatacgcgtaaatatcactatttc

SEQ ID NO: 10752 - protein, 33 aa, Streptococcus agalactiae
MLKKQYELTDLAKNRKIPKVKLLGFYTRKYHYF

SEQ ID NO: 10753 - DNA, 111 bp, Streptococcus agalactiae
gtggggagagaacctgctgttgagggtattttcaccttttttattgctatttttcgtgttataataagaagactatacttttttgacatggagaagtgcgatgacattcta

SEQ ID NO: 10754 - protein, 37 aa, Streptococcus agalactiae
MGREPAVEGIFTFFIAIFRVIIRRLYFFDMEKCDDIL

SEQ ID NO: 10755 - DNA, 120 bp, Streptococcus agalactiae
atgtcagatactcagctaacactagaagaacaagaatttctcaaacaatatatgtctagaaaataccactactttagggatattattcgttacggtcaagtgttggctaaattgactaaa

SEQ ID NO: 10756 - protein, 40 aa, Streptococcus agalactiae
MSDTQLTLEEQEFLKQYMSRKYHYFRDIIRYGQVLAKLTK

SEQ ID NO: 10757 - DNA, 330 bp, Streptococcus agalactiae
gtgagggctgaaattatcgctgtaggaacagaaattttaacaggacagatcgttaatacaaacgcacaatttttgtcggagaaaatggcagaattgggaattgatatttatttccagacagctgtaggagacaatgaggaacgtttattatcgcttttagatatagctagtcagcgcagtcaattggttatcctatgtggtggacttggccctacagaggatgacttaacgaagcaaacttttgctaaatttttaggtaaatcattaacagtagatttattagctagtcgaaaattggatcgttttttttgcaagtcgtcctcagtttgc

SEQ ID NO: 10758 - protein, 110 aa, Streptococcus agalactiae
MRAEIIAVGTEILTGQIVNTNAQFLSEKMAELGIDIYFQTAVGDNEERLLSLLDIASQRSQLVILCGGLGPTEDDLTKQTFAKFLGKSLTVDLLASRKLDRFFCKSSSVC

SEQ ID NO: 10759 - DNA, 246 bp, Streptococcus agalactiae
atggcaacattaaaaacagaacatgattttgacttaacccgtaactggtaccgcaaatccgtctttctagatgagctctggcatggcatgaccgttgcaacacttaatagttacattcgtcagatgaaagacagcccttacgctttcggtatcaaaggaacacacggcaatgtctttatccactcagaagtctttgtggcgtggtttgactacaaaattgccaatcagtatgtcgcaaagatggcg

SEQ ID NO: 10760 - protein, 82 aa, Streptococcus agalactiae
MATLKTEHDFDLTRNWYRKSVFLDELWHGMTVATLNSYIRQMKDSPYAFGIKGTHGNVFIHSEVFVAWFDYKIANQYVAKMA

SEQ ID NO: 10761 - DNA, 96 bp, Streptococcus agalactiae
ttggtttcttcaaacgatgaagacggttcgccaccccaccgctgggcgagtggtcaatacggtagcccagagcaggtggggaaggtggcaaacggc

SEQ ID NO: 10762 - protein, 32 aa, Streptococcus agalactiae
MVSSNDEDGSPPHRWASGQYGSPEQVGKVANG

SEQ ID NO: 10763 - DNA, 213 bp, Streptococcus agalactiae
atgaatcaaacaagtattgaactacaaatggtggagtgggttgcctactcgccagagacacaagagaaagttttcatcaaaccagaggactgcaaagatttagatgacagagaactctatcaccttatcaagagtacgggatttgaacgattgattgaatctagagccttgcagattgtgaccgactttctcaatcagaaaacacaggtaagc

SEQ ID NO: 10764 - protein, 71 aa, Streptococcus agalactiae
MNQTSIELQMVEWVAYSPETQEKVFIKPEDCKDLDDRELYHLIKSTGFERLIESRALQIVTDFLNQKTQVS

SEQ ID NO: 10765 - DNA, 171 bp, Streptococcus agalactiae
atgaaggttatctttcaacagataatgctcaaaggaatagaacctactattgtcctcaacttctttcaatcgttcaataaggtatctcttaatgaagtaatgttcacctctgcttcacttatttcttttttagtgaagcaaaagtcatctttacttctcttatctatttct

SEQ ID NO: 10766 - protein, 57 aa, Streptococcus agalactiae
MKVIFQQIMLKGIEPTIVLNFFQSFNKVSLNEVMFTSASLISFLVKQKSSLLLLSIS

SEQ ID NO: 10767 - DNA, 168 bp, Streptococcus agalactiae
ttggataagagtgtggtcgctttattagtgattcacccaaactggcataacttacttggattagttatccacggaagtgaatcgggagaaatttctttaggggcagaatatatctctactctttcaatactaactgttagtgaattttcttcatctgacctgtctgct

SEQ ID NO: 10768 - protein, 56 aa, Streptococcus agalactiae
MDKSVVALLVIHPNWHNLLGLVIHGSESGEISLGAEYISTLSILTVSEFSSSDLSA

SEQ ID NO: 10769 - DNA, 483 bp, Streptococcus agalactiae
atgaataaaaaagaaacaagacaccaattaattcgttccttagtctctgagactaaggtgcgtacacaacatgagttaagggaattactagaaaaaaatggcgtttcagtgacgcaagcaacattatctcgagatatgaaggaacttaatttaattaaggttaacgaaagcagtgataatgctacagaaacttattatgagattcatagtatatctcagaagcgttgggaagaacggttacgtttttacatggaagatgccctagtcatgctgtttccagttcaaaaccaaatcgttttgaagacactacctggcttagctcaatcttttggctccatattagattcgattttattacctgagatcttagcaactgtctgtggtgatgatacttgtttgattatttgtaataatagtgaagaagctcaaaagtgttttgagaaattaagtcagtatacgccgcctttcttcttctcaaaaaaa

SEQ ID NO: 10770 - protein, 161 aa, Streptococcus agalactiae
MNKKETRHQLIRSLVSETKVRTQHELRELLEKNGVSVTQATLSRDMKELNLIKVNESSDNATETYYEIHSISQKRWEERLRFYMEDALVMLFPVQNQIVLKTLPGLAQSFGSILDSILLPEILATVCGDDTCLIICNNSEEAQKCFEKLSQYTPPFFFSKK

SEQ ID NO: 10771 - DNA, 690 bp, Streptococcus agalactiae
atgcgcagagatgatattataatgccacaagatggaagaaaaatggctgtattattgggttttattggtggttttattgacgtttatagtcacatgcagtttcactcccttgttgcaacacagacaggtaatattatcttgatggtggcaaatctcggacaaaatgattttcacttttttatcactaaattattttctattttctttttttcaattggttttttggttggtattgtgattaaagaacgtgcagtaacagctttttggcgtctatatgcattatgtccccttttactttctacgatgtttattccttttgttgaaaatgtaaaccacaatatctgggtagctttattagcctttagcacaggtattttaatgttgacattttcaggaagtcgcattgaatcggaaccatatactatcttaatgacttctggtaattatcggaaaatgctacaattttggtatgagtatattgttaatcgtcagagaacggctatgcaaaaaagacgagctatcaattattcactggtagttctagcatttattattggagcattggtagctgcaatagtttacgatatttttgcatatagagctattttaggtgtgacgataacgcttttaattattatgattcattatacgattgaaattattaagaacgatttaacgttacataatgtt

SEQ ID NO: 10772 - protein, 230 aa, Streptococcus agalactiae
MRRDDIIMPQDGRKMAVLLGFIGGFIDVYSHMQFHSLVATQTGNIILMVANLGQNDFHFFITKLFSIFFFSIGFLVGIVIKERAVTAFWRLYALCPLLLSTMFIPFVENVNHNIWVALLAFSTGILMLTFSGSRIESEPYTILMTSGNYRKMLQFWYEYIVNRQRTAMQKRRAINYSLVVLAFIIGALVAAIVYDIFAYRAILGVTITLLIIMIHYTIEIIKNDLTLHNV

SEQ ID NO: 10773 - DNA, 702 bp, Streptococcus agalactiae
gtgacttacccagatggttcaaaagatactgtagatgtgactgttaaggttgtcgatccacgtacagatgccgataagaatgatccagcaggtaaagatcagcaagtcaatgtaggtgagacaccgaaggcagaagattctattggtaacttaccagatcttccgaaaggtacaacagtagcctttgaaactccagttgatacggcaacaccgggagacaaaccagcaaaagttgttgtgacttacccagatggttcaaaagatactgtagatgtgactgttaaggttgtcgatccacgtacagatgccgataagaatgatccagcaggtaaagatcagcaagtcaatgtaggtgagacaccgaaggcagaagattctattggtaacttaccagatcttccgaaaggtacaacagtagcctttgaaactccagttgatacggcaacaccgggagacaaaccagcaaaagttgttgtgacttacccagatggttcaaaagatactgtagatgtgactgttaaggttgtcgatccacgtacagatgccgataagaatgatccagcaggtaaagatcagcaagtcaatggtaaaggaaataaactaccagcaacaggtgagaatgcaactccattctttaatgttgtagctttgacaattatgtcatcagttggtttattatctgtttctaagaaaaaagaggat

SEQ ID NO: 10774 - protein, 234 aa, Streptococcus agalactiae
MTYPDGSKDTVDVTVKVVDPRTDADKNDPAGKDQQVNVGETPKAEDSIGNLPDLPKGTTVAFETPVDTATPGDKPAKVVVTYPDGSKDTVDVTVKVVDPRTDADKNDPAGKDQQVNVGETPKAEDSIGNLPDLPKGTTVAFETPVDTATPGDKPAKVVVTYPDGSKDTVDVTVKVVDPRTDADKNDPAGKDQQVNGKGNKLPATGENATPFFNVVALTIMSSVGLLSVSKKKED

SEQ ID NO: 10775 - DNA, 1830 bp, Streptococcus agalactiae
atgaatattgaagatttgaagaaacgtcaagaaaagattagaaacttttcgattatcgctcatattgaccatggaaaatcaaccttagcagaccgtattttagagaaaacagaaacggtttctagtcgtgaaatgcaggcgcaactgttggactctatggatctagaacgtgagcgtggaattactataaagttaaatgctattgagcttaattatactgctaaagatggtgaaacttacatttttcacttgattgacacgccagggcatgttgacttcacatatgaagtatcacgttcattggcagcttgtgagggtgctatactggttgttgatgcagcccaaggaattgaagctcaaactctggcaaatgtttatttggctctagacaatgatttagagatactaccagttattaataaaattgatttaccagcagcagatccagaacgtgtacgtgcagaagtagaggatgttattggtctagatgcttcagaagctgtgcttgcctcagctaaggcagggattggtattgaagaaattttagagcagatcgttgaaaaagttcctgcaccgactggggaagtagatgctcctcttcaagctctaatttttgattctgtttatgatgcttatcgtggagtaattcttcaagtaaggattgtaaatggtatggttaagccaggagataagattcaaatgatgtctaatggtaaaaccttcgacgttactgaggttggtattttcactcccaaagcagttggacgtgattttttagcaactggagatgtagggtatattgctgcctcaattaaaacggttgctgatacacgtgttggtgataccattacccttgctaataacccagcaatagaacccttgcatggctataagcaaatgaacccaatggtttttgccggtctttatccaattgaatcaaataagtataacgatctgcgtgaagcccttgaaaaattacaattgaatgatgctagtctacagtttgaaccggaaacatcacaagcattagggtttggtttccgttgtggtttcttaggacttttacatatggacgttatccaagagcgcttggaacgagagttcaatattgatcttattatgactgcaccatcagtagtttatcatgttaatacaactgacggtgaaatgcttgaagtttcgaatccatctgaatttcctgatcctactcgtgttgacagcattgaagaaccatatgttaaggcgcaaattatggttcctcaagaatttgtcggtgctgtaatggagttagcacaacgtaaacgtggtgactttgtaacaatggattatattgatgataatcgtgttaatgttatttaccaaattcctttagctgaaattgtgtttgacttctttgataagcttaaatcatcaacacgtggctatgctagttttgattatgaaatttccgaatatcgtcgctcacaattagttaaaatggatattcttttaaatggtgataaagtggatgctttaagctttattgttcacaaagaatttgcctatgaacgtggtaaattgatcgttgataagttgaaaaaaatcattcctcgtcagcagtttgaagttcctatccaagcagctattggacaaaaaattgtggcccgttctgatataaaagcactacgtaaaaatgtcttagcaaaatgttatggtggtgacgtttcacgtaaacgtaagttgcttgaaaaacaaaaagctggtaaaaagcgcatgaaagcaattggttccgtcgaagttcctcaggaagctttcttaagtgttttatcaatggacgatgatgacaaaaaa

SEQ ID NO: 10776 - protein, 610 aa, Streptococcus agalactiae
MNIEDLKKRQEKIRNFSIIAHIDHGKSTLADRILEKTETVSSREMQAQLLDSMDLERERGITIKLNAIELNYTAKDGETYIFHLIDTPGHVDFTYEVSRSLAACEGAILVVDAAQGIEAQTLANVYLALDNDLEILPVINKIDLPAADPERVRAEVEDVIGLDASEAVLASAKAGIGIEEILEQIVEKVPAPTGEVDAPLQALIFDSVYDAYRGVILQVRIVNGMVKPGDKIQMMSNGKTFDVTEVGIFTPKAVGRDFLATGDVGYIAASIKTVADTRVGDTITLANNPAIEPLHGYKQMNPMVFAGLYPIESNKYNDLREALEKLQLNDASLQFEPETSQALGFGFRCGFLGLLHMDVIQERLEREFNIDLIMTAPSVVYHVNTTDGEMLEVSNPSEFPDPTRVDSIEEPYVKAQIMVPQEFVGAVMELAQRKRGDFVTMDYIDDNRVNVIYQIPLAEIVFDFFDKLKSSTRGYASFDYEISEYRRSQLVKMDILLNGDKVDALSFIVHKEFAYERGKLIVDKLKKIIPRQQFEVPIQAAIGQKIVARSDIKALRKNVLAKCYGGDVSRKRKLLEKQKAGKKRMKAIGSVEVPQEAFLSVLSMDDDDKK

SEQ ID NO: 10777 - DNA, 762 bp, Streptococcus agalactiae
ttggacgctaaatttgatttcgctaaacaattagtgtataaagctggtcaattcattaaatctgagatgcaaaatacttttgatgttgaggaaaagtctcgatttgatgatttagtgacaagtcttgataaaaaaacacaaaaattattaattcaagaaattattcaacattacccagatgataatatacttgccgaagaagatgatgtgcgctcacccattgcacaaggtaatgtttgggttttagaccctattgatggaactgttaattttattgttcaaaaagataactttgctgttatgttagcttattacgaagaaggcgttggacaatttggtatcatctacgacgttatggctgatattctttacagcgggggaggacattttgatgtctatgctaacgataaaaaaattgttccttttcaagagtgtcctttagaacgttgcttacttggagtaaattctgctatgtatgcagaaaatgattgcggtattgcccatttagcttctgaaaccttaggtgttcgtatctatggtggtgctggaattagcatggcaaaagtcatgcagggcaaattattagcttatttttcgtatattcaaccttgggattatgctgcagcaaaaatcatgggggagacattaggatttaccttattaacgcttgacggggaagaacccaactattcaacaagacaaaaagtaatgttcctaccaaagtcgaaattaaatcttatccaatcctaccttaccaaaaaa

SEQ ID NO: 10778 - protein, 254 aa, Streptococcus agalactiae
MDAKFDFAKQLVYKAGQFIKSEMQNTFDVEEKSRFDDLVTSLDKKTQKLLIQEIIQHYPDDNILAEEDDVRSPIAQGNVWVLDPIDGTVNFIVQKDNFAVMLAYYEEGVGQFGIIYDVMADILYSGGGHFDVYANDKKIVPFQECPLERCLLGVNSAMYAENDCGIAHLASETLGVRIYGGAGISMAKVMQGKLLAYFSYIQPWDYAAAKIMGETLGFTLLTLDGEEPNYSTRQKVMFLPKSKLNLIQSYLTKK

SEQ ID NO: 10779 - DNA, 1371 bp, Streptococcus agalactiae
ttgggaatactgattgtatttccttttttattggttttattgttgactgcttcgtcaagttctcaacaagattgtcaaattacaccagatgtatcttcacaagttgaaacctcaagtgagaatgcttccaatagtgattggacaaaaaagggaacagttgcaaatcaaacagcagagaaggtattcaatgcttgggtaagtaaaggcttatctggtgcgagtgcatcagggattgttggttgggttaattcagaaggtggatttgctatgataggtcgagcagaagggcattatggtaatgatttaaaaacaaattcaattgcctttaatgtgagacctactgggttatcttactatacgactgaagctggaggtggtatttatcaaatcacacctttcacaaagtatgccccattaggcgatcccaaatgggaagatgcagatgccatgaatgcctttgttatgaaatccattaaatcaggagactggaataaagcaatggatttatcaggtggaaatcattcttttgaagagatggcacagatgactgatcccaagcaggccactttagtttggaatgcttacgaacgaggaaatactgcatatattaataaagctcaaaagactgcggatgggcaaaaagcctatgaaatatttaatggttcaaaatataaatttgatgcagaaaaattttctaaaagttttggtggtggttcaaaaacgtcctcgtctggtaagagcgatataatttctgattctacagttttatctctttgtgattcagctagtaatgcggtacagggcttatttggtaaagataagtcagggaaagttaaatacacttcttataatgcatggaaaccagatcaattaccaagtgatttgaaaaagtatgcaatagatcctaagtcagttggtttattttatcgaacgtctagtggatggaatgcgatagcttctactggtggtcaatgtacagatctttcagcaagtttgatgtatggtttatggcttaaaggcggaatgcatccaacgcaaagaatgggaaatggtaatatggttgtttctaattgggtatctgcattcggtggacgctctgaaaatactccatcttctggagctgttttttcaagttcaggtacttctagtgctgggcatactggagtggttagtcatgtatttgaaaatggcgatatgttaatagtagagcaaaattattcaacttattctggagataatagaggatttggaccatattcatggaattatcgttatgtttctactttagaattaaaaaaagagcattatagtttttataatccctctaaagctggttataaattgtctgataaagtgaaaacggtaggtagt

SEQ ID NO: 10780 - protein, 457 aa, Streptococcus agalactiae
MGILIVFPFLLVLLLTASSSSQQDCQITPDVSSQVETSSENASNSDWTKKGTVANQTAEKVFNAWVSKGLSGASASGIVGWVNSEGGFAMIGRAEGHYGNDLKTNSIAFNVRPTGLSYYTTEAGGGIYQITPFTKYAPLGDPKWEDADAMNAFVMKSIKSGDWNKAMDLSGGNHSFEEMAQMTDPKQATLVWNAYERGNTAYINKAQKTADGQKAYEIFNGSKYKFDAEKFSKSFGGGSKTSSSGKSDIISDSTVLSLCDSASNAVQGLFGKDKSGKVKYTSYNAWKPDQLPSDLKKYAIDPKSVGLFYRTSSGWNAIASTGGQCTDLSASLMYGLWLKGGMHPTQRMGNGNMVVSNWVSAFGGRSENTPSSGAVFSSSGTSSAGHTGVVSHVFENGDMLIVEQNYSTYSGDNRGFGPYSWNYRYVSTLELKKEHYSFYNPSKAGYKLSDKVKTVGS

SEQ ID NO: 10781 - DNA, 927 bp, Streptococcus agalactiae
atgaaaacaagatcaaaacttgcagcaggctttttgacacttatgtcagttgccacattagctgcctgctcaggtaaaacatcaaatggaacaaatgttgttacaatgaagggcgacactattacagtctctgatttttatgatcaagtaaaaacatcaaaagctgcacaacaatcaatgcttacattgatcctctcacgtgtttttgatacacagtatggtgataaagtttcagataaaaaagtatcagaagcttataataagacagctaaaggctatggtaattcattttcaagcgcactttcacaagcaggtttgactccggaaggttacaaacaacaaattcgcacaactatgcttgtggaatatgctgtaaaagaagcagctaagaaagaattaacagaagcaaactataaagaagcatataaaaactatactcctgaaacttctgtacaagtaatcaaattggatgcagaagataaagctaaatctgtccttaaagatgtaaaggctgatggagctgattttgcaaagattgcaaaagaaaaaacaacagctactgataagaaagttgagtataaatttgattctgcagggacaaccctccctaaagaagttatgtcagcagcctttaagctagataaaaatggtgtttcagatgtggtttcaacggttgattcaacaacttataaaacaagttactacatcattaaagtaactgataagacagagaaaaaatctgattggaaatcttacaaaaatcgcttaaaagaagttattcttaaggataaaacaagcgatagagccttccaaaataaagtgatttcaaaagccttagaaaaagctaatgttaagattaaagataaagcatttgcaggcatcttatcacaatatgctacaacaagtggttcatcatcacttaaaaaa

SEQ ID NO: 10782 - protein, 309 aa, Streptococcus agalactiae
MKTRSKLAAGFLTLMSVATLAACSGKTSNGTNVVTMKGDTITVSDFYDQVKTSKAAQQSMLTLILSRVFDTQYGDKVSDKKVSEAYNKTAKGYGNSFSSALSQAGLTPEGYKQQIRTTMLVEYAVKEAAKKELTEANYKEAYKNYTPETSVQVIKLDAEDKAKSVLKDVKADGADFAKIAKEKTTATDKKVEYKFDSAGTTLPKEVMSAAFKLDKNGVSDVVSTVDSTTYKTSYYIIKVTDKTEKKSDWKSYKNRLKEVILKDKTSDRAFQNKVISKALEKANVKIKDKAFAGILSQYATTSGSSSLKK

SEQ ID NO: 10783 - DNA, 813 bp, Streptococcus agalactiae; identical to SEQ ID NO: 843

SEQ ID NO: 10784 - protein, 271 aa, Streptococcus agalactiae
LKKKLKTFSLILLTGSLLVACGRGEVSSHSATLWEQIVYAFAKSIQWLSFNHSIGLGIILFTLIIRAIMMPLYNMQMKSSQKMQEIQPRLKELQKKYPGKDPDNRLKLNDEMQSMYKAEGVNPYASVLPLLIQLPVLWALFQALTRVSFLKVGTFLSLELSQPDPYYILPVLAALFTFLSTWLTNKAAVEKNIALTLMTYVMPFIILVTSFNFASGVVLYWTVSNAFQVFQILLLNNPYKIIKVREEAVRVAHEKEQRVKRAKRKASKKRK

SEQ ID NO: 10785 - DNA, 690 bp, Streptococcus agalactiae
atgaataaaatagctaatacagaagttgaaataaatatattcaaccttttaaaaaaattgtggaaaaagaaatttttaatcacatttgttgccattgcatttgcaacagctggacttttctatagtctttttattgttacgccacaatatacttcttcaacaaggatatatgtcattaaccctaatacccctaataatagtattactgcacaagatctacaagcggggagttttcttgcaaatgactataaggagattattacgtctactgacgttctagaaaaagttatttcttctgaaaaattgaattatccttcgtctcagttgttgcaaaaaataacagtttctattttaaaagatacacgtgttatttcaatatcggtcgaagatgctaatccaaaaatgtctcaaaaattagcaaattcagttagagaagcagcagtttcaaaaatcaaggcagttactcaagtagaggatatcactactcttgagaagggaaatttacctaaagcaccatcttctcctaatattaaaaagaatgtactaatcgggtttattgttggtgcaggattatcaactattgttttagttattatgggtattttggatgatcgtgttaatactgaagaagatattgaaaaggtsctaggacttacttctttaggtatagtaccagatttgaataaactt

SEQ ID NO: 10786 - protein, 230 aa, Streptococcus agalactiae; identical to SEQ ID NO: 2768

SEQ ID NO: 10787 - DNA, 669 bp, Streptococcus agalactiae
atgactttacaagacttaactaaaaagaatcaagagtttgttcatattgcaactaatcaacttttagctgatggaaaatcagatgcagaaatcaaagctattttagaagaacatctcccagagattatagataatcagaaaaaaggaattaccgcacgctcactcttaggagcaccaactacttgggcagcctcattcactgagcgacctgaggataaagctagagtatctgtacaaaaaaataccaatccttggttgatgtggttagatacttccttactatttcttggcttagtaactgctttgaatggtttaatgttgctatttggtcaatctaatgtcaatacagggcttatttcaattttaactcttggttttggtggtggtgcggccatgtacgttacttattactatatttatcgccatatgggtaaaccaaaatctgaaagaccaggctggcttaaatctttcgcagtactggcactagttatgttagtttggtttgccttatttgcagtagtacctcttctacctgcaactattaatcctaaacttcctgaggttgttttgtttattattgctttagcatcgtttggtttgcgcttttatttacaacgtaaatataatattcaaagctcaatggcaccagtggcaccmcaacaaagaaga

SEQ ID NO: 10788 - protein, 223 aa, Streptococcus agalactiae; identical to SEQ ID NO: 3552

SEQ ID NO: 10789 - DNA, 540 bp, Streptococcus agalactiae
atgtcaaaaaaaacmacacaaatggtttcttatacttctattttagtagcttttgcaatcatgattcctataatcatgcctgctaaaataattattgggcctgcttctttcaccttagcaagccatgtacctttatttttaagtatttttatatctgttccagttgcaatattggtagctttagggacaggacttggatttctactagctggttttccgattgtaatcgttcttagagctttatcacatatcggatttgcattaattgcggctttcttgattaagtcaaagccctctttattgatgagtaaatggcaaacattgttatttgctgtagctattaacataattcatggtctgctcgaatttattactgtttatataatcacaatgacttctaacagtagttcaacttatttatggtcactattttctttgataggactaggctctttgctacatggattggtagatttttacatagctctcttcatttggaaatggatgacacaaaagttggggaaaacacttaggataaga

SEQ ID NO: 10790 - protein, 180 aa, Streptococcus agalactiae; identical to SEQ ID NO: 8838

SEQ ID NO: 10791 - DNA, 198 bp, Streptococcus agalactiae
gtgggttcgattcctactgcccgtgttttttctaatatggcgggtgtggtgaagtggttaacacatcagattgtggctctgacattcgtgggttcgattcccatcactcgccttttcatggggtatagccaagcggtaaggcaagggactttgactccctcatgcgttggttcgaatccagctaccccagttttaaga

SEQ ID NO: 10792 - protein, 66 aa, Streptococcus agalactiae
MGSIPTARVFSNMAGVVKWLTHQIVALTFVGSIPITRLFMGYSQAVRQGTLTPSCVGSNPATPVLR

SEQ ID NO: 10793 - DNA, 1653 bp, Streptococcus agalactiae
atggcaaaacagaaaaataactggcgccgtgttggagttggtgtccttacacttgcttcagttgcgactcttgctgcatgtggaagtaaatcagcttcccaggattctaatggagcgattaattgggctattccaacagaaatcaatacactagatttatctaaagtcacagacacttactcaaatctagctattggtaactctagtagtaatttccttcgcttagataaagatggaaagacaagaccagatttggctactaaagtagatgtttcaaaagatggcttaacttatacagctacattacgtaaaggcttgaagtggtcagatggcagtaaacttactgcaaaggattttgtttattcatggcaacgtttagttgatcctaaaacagcttcacaatatgcttaccttgctgttgaagggcatgtgcttaatgccgataaaatcaacgaaggacaagagaaagacttgaataagctaggtgttaaggcggaaggcgatgacaaagttgttattactttatctagtccgtctccacaatttatctactaccttgcattcactaacttcatgccacaaaaacaagaagttgttgaaaaatatggaaaagattacgcaactacttcaaaaaatacagtttactcaggaccatatactgttgaaggttggaatggttcgaatggtactttcacgctgaagaaaaacaaaaattattgggacgctaaaaatgtaaaaacaaaagaagttcgcatccagactgttaaaaaaccagataccgccgttcaaatgtataaacgtggtgagttagatgcagctaatatctcaaatacttctgctatttatcaagctaataagaataataaagatgtcacagatgttctagaagcgaccactgcctatatggaatataatactactggttctgtgaaagggcttgataatgttaagattcgtcgcgccttaaacttagcaactaaccgtaaaggagttgttcaagcagccgttgatacaggctcaaaaccggcaattgcttttgcacctactggtttagccaaaacaccagatggaactgatttggcaaaatatgttgccccaggttatgaatataataaaactgaagcagcaaaactctttaaagaaggtttggctgaatcaggcttgactaagctaaaattaacaattacagcagatgctgatgctcctgctgccaaaaactctgttgactatatcaagtctacttgggaagctgctcttccaggacttactgttgaagaaaaatttgtaacctttaaacaacgcttagaagacagtagaaaacaaaactttgacatcgtagtttctctttggggtggggattatccagaaggatcaactttctacggcctctttaagtcagattcacaaaataacgatggaaaatttgctaacaaggactatgatgctgcttataacaaggcaatttctgaagatgcgatgaaaccagcagaatcagcgaaggactataaagaagcagagaaaattttatttgagcaaggtgcttataacccactctacttccgtagtggtaaaggtttacaaaatccaaaattaaaaggtgttattcgtaatactacaggtttgtcaatagactttacacatgcttataaaaaa

SEQ ID NO: 10794 - protein, 551 aa, Streptococcus agalactiae
MAKQKNNWRRVGVGVLTLASVATLAACGSKSASQDSNGAINWAIPTEINTLDLSKVTDTYSNLAIGNSSSNFLRLDKDGKTRPDLATKVDVSKDGLTYTATLRKGLKWSDGSKLTAKDFVYSWQRLVDPKTASQYAYLAVEGHVLNADKINEGQEKDLNKLGVKAEGDDKVVITLSSPSPQFIYYLAFTNFMPQKQEVVEKYGKDYATTSKNTVYSGPYTVEGWNGSNGTFTLKKNKNYWDAKNVKTKEVRIQTVKKPDTAVQMYKRGELDAANISNTSAIYQANKNNKDVTDVLEATTAYMEYNTTGSVKGLDNVKIRRALNLATNRKGVVQAAVDTGSKPAIAFAPTGLAKTPDGTDLAKYVAPGYEYNKTEAAKLFKEGLAESGLTKLKLTITADADAPAAKNSVDYIKSTWEAALPGLTVEEKFVTFKQRLEDSRKQNFDIVVSLWGGDYPEGSTFYGLFKSDSQNNDGKFANKDYDAAYNKAISEDAMKPAESAKDYKEAEKILFEQGAYNPLYFRSGKGLQNPKLKGVIRNTTGLSIDFTHAYKK

SEQ ID NO: 10795 - DNA, 309 bp, Streptococcus agalactiae
atgatgcaagagtactttggtattggtcttgatagtagcagccgctgttaccactatcatactaaattggatattgtcgctttaaaatgtgctgtttgtcaaaaatattatgcttgttataaatgtcatgatgcactcgaggagcattgttttgcagcaacaaaatctgatgaaacgtttcctgtcttatgcggttcttgtcgtcagatgttgacattaaaagagtataaaactggtttttgtccttattgtcgtatgctttttaatccaaattgtcaacgccatgattctatttatttttcgaaggag

SEQ ID NO: 10796 - protein, 103 aa, Streptococcus agalactiae
MMQEYFGIGLDSSSRCYHYHTKLDIVALKCAVCQKYYACYKCHDALEEHCFAATKSDETFPVLCGSCRQMLTLKEYKTGFCPYCRMLFNPNCQRHDSIYFSKE

SEQ ID NO: 10797 - DNA, 453 bp, Streptococcus agalactiae
ttggcagtcaacgaaccgcccgaagtattttggggatgtaggaggaagggagtcactatctcgcctcctctttttatagcttatttagattggagaacatttatgaacacacgtgtctttaaggacatctcaaaggttcaacacagggcatggctgggatttacaactagacaggttatttttgtatttccagctgtcgccctaaccattttggttttgggcttgaacctattttattggcaatttggggattggtttgtctatggttttgtttttagctttaccattccactcatgttatttggggtctatcgccccaacgatttaccatttgaaatatacctcaagtaccgttttcattatgaactaacggtgccagaccgcacatttactggaagaaaaggagaccaacgtgaaaaaattaaaacactcaatgaaatcaaagacctcttc

SEQ ID NO: 10798 - protein, 151 aa, Streptococcus agalactiae
MAVNEPPEVFWGCRRKGVTISPPLFIAYLDWRTFMNTRVFKDISKVQHRAWLGFTTRQVIFVFPAVALTILVLGLNLFYWQFGDWFVYGFVFSFTIPLMLFGVYRPNDLPFEIYLKYRFHYELTVPDRTFTGRKGDQREKIKTLNEIKDLF

SEQ ID NO: 10799 - DNA, 216 bp, Streptococcus agalactiae
gtgaacgtgaaaatgttacaatatcttgaggaggtgaaacatatgtcaaaaacagtagtacgtaaaaacgaatcacttgacgatgcacttcgtcgtttcaaacgttctgtgactaaagctggtactcttcaagaatcacgtaaacgtgaattctacgaaaaaccttctgtaaaacgtaaacgtaaatcagaagcagctcgcaaacgtaaaaaattc

SEQ ID NO: 10800 - protein, 72 aa, Streptococcus agalactiae
MNVKMLQYLEEVKHMSKTVVRKNESLDDALRRFKRSVTKAGTLQESRKREFYEKPSVKRKRKSEAARKRKKF

SEQ ID NO: 10801 - DNA, 801 bp, Streptococcus agalactiae
atgggggtcaagaagggccaacgtatctatcatatcctcaaaaccaacgatctagaagtgagttcttcaaccgtttatcgacacatcaagaaaggctacctatccatcacaccaatcgacctacccagagctgtgaagttcaaaaaaaggcgaaagagcacactccctcctattccaaaagcgattaaagaagggcgacggtacgaggattttatagaacacatgaaccaatcagagctgaactcctggcttgaaatggacacggttattggacggattggtggaaaggtccttctcaccttcaatgtcgccttctgtaacttcatctttgccaaactgatggattctaagacagctatcgaaactgctaaacacatacaggtcattaagaggacactctatgataacaagagagacttcttcgaactctttcctgttatcctaacggataatggtggggaattcgctagagtggatgatattgagatagatgtttgtggacagtctcaactcttcttttgtgaccctaatcggtctgaccagaaagcaagaatcgagaagaatcataccctcgtgagagacatactgcctaaggggacttccttcgacaacttgactcaagaggacattaatctggcactatctcatatcaacagcgttaagagacaggctctaaatggtaaaacggcttatgagctattctcttttacttacggaaaagacatcgcaagtatactcggtattgaggaaattactgcggaagacgtctgccaatctcccaaactattaaaagacaaaatc

SEQ ID NO: 10802 - protein, 267 aa, Streptococcus agalactiae
MGVKKGQRIYHILKTNDLEVSSSTVYRHIKKGYLSITPIDLPRAVKFKKRRKSTLPPIPKAIKEGRRYEDFIEHMNQSELNSWLEMDTVIGRIGGKVLLTFNVAFCNFIFAKLMDSKTAIETAKHIQVIKRTLYDNKRDFFELFPVILTDNGGEFARVDDIEIDVCGQSQLFFCDPNRSDQKARIEKNHTLVRDILPKGTSFDNLTQEDINLALSHINSVKRQALNGKTAYELFSFTYGKDIASILGIEEITAEDVCQSPKLLKDKI

SEQ ID NO: 10803 - DNA, 123 bp, Streptococcus agalactiae
ttggagctggagacaatgacatttggtctagtttcaaccaatacatcacacttaaaagatgatgttttcacaccgtcaatggtaagttcattgatttttgtcatgccattcctcctctcaaat

SEQ ID NO: 10804 - protein, 41 aa, Streptococcus agalactiae
MELETMTFGLVSTNTSHLKDDVFTPSMVSSLIFVMPFLLSN

SEQ ID NO: 10805 - DNA, 237 bp, Streptococcus agalactiae
ttgccaatttctgtcttcgttctaccatcaggcttgttctcttcactaggtgagggttgcgatggttctgttgtaggtggattagttgacggatttgtttctggttcacttgatgaactcgattcattttcagaagaagaaccagtactagactggtctagttcatctgatcttttctcctcagataaggtcgtagtcacgacactcgtgtcagtattcttatcacttgtatcagca

SEQ ID NO: 10806 - protein, 79 aa, Streptococcus agalactiae
MPISVFVLPSGLFSSLGEGCDGSVVGGLVDGFVSGSLDELDSFSEEEPVLDWSSSSDLFSSDKVVVTTLVSVFLSLVSA

SEQ ID NO: 10807 - DNA, 210 bp, Streptococcus agalactiae
ttgtctatcaatttcttcgcttcttcaatattcatttgctacctccaaaaatacttcactgcattcattgtactcaattctataaccttttttgtcatttacccatttataaacatgattatccttgctattttagtcgctcatacgaaaaacgaatatgctttaaaaaatcttcaatgtcaattactgcacaaccatcaatgtcagacc

SEQ ID NO: 10808 - protein, 70 aa, Streptococcus agalactiae
MSINFFASSIFICYLQKYFTAFIVLNSITFFVIYPFINMIILAILVAHTKNEYALKNLQCQLLHNHQCQT

SEQ ID NO: 10809 - DNA, 171 bp, Streptococcus agalactiae
gtgctgtttcgaatggttccaaaacacaaaatcttttgttgctcctggacgtattgttttagagctgtgctgtttcgaatggttccaaaacatgtaaggtattgtaaaacttcttcttgcggttttagagctgtgctgtttcgaatggttccaaaacactgttcctataat

SEQ ID NO: 10810 - protein, 57 aa, Streptococcus agalactiae
MLFRMVPKHKIFCCSWTYCFRAVLFRMVPKHVRYCKTSSCGFRAVLFRMVPKHCSYN

SEQ ID NO: 10811 - DNA, 165 bp, Streptococcus agalactiae
atgtggataatactctttaaagtgtggataatactatattataaagctttttatctgatttttctgtattttgaaatcaaattatattttttaattttagtttatatttcaaaaattaaaacaccctataaccaagtatcacagggtgcatatttttatattata

SEQ ID NO: 10812 - protein, 55 aa, Streptococcus agalactiae
MWIILFKVWIILYYKAFYLIFLYFEIKLYFLILVYISKIKTPYNQVSQGAYFYII

SEQ ID NO: 10813 - DNA, 135 bp, Streptococcus agalactiae
atggttccaaaactggttatacatttactaatccatcagcattgttttagagctgtgctgtttcgaatggttccaaaacaagctaattctcatctcaccgagatggatagttttagagctgtgctgttattatgc

SEQ ID NO: 10814 - protein, 45 aa, Streptococcus agalactiae
MVPKLVIHLLIHQHCFRAVLFRMVPKQANSHLTEMDSFRAVLLLC

SEQ ID NO: 10815 - DNA, 360 bp, Streptococcus agalactiae
ttgcttaataaaacctatttaacgacagcaacaatgtcactttcgcgaacaactgtcactttttcgttaccgtctttaacttccagaccagcaccattttcgactaaaacagtatcaccctctgcaacgctcggtgcaactaattcccctgttaaggtacgaataccgtcacccacagcaagaactttggctgtctttgtcgcatcatggcttgctcctgcaagaacaaaaccaccgacagatttctcttcagtttcaacaaacgaaatgatcacacgatcacctaatggttttaacataataaacgaacctccatacgagatatattttgattttttagcactcttatacagagagtgc

SEQ ID NO: 10816 - protein, 120 aa, Streptococcus agalactiae
MLNKTYLTTATMSLSRTTVTFSLPSLTSRPAPFSTKTVSPSATLGATNSPVKVRIPSPTARTLAVFVASWLAPARTKPPTDFSSVSTNEMITRSPNGFNIINEPPYEIYFDFLALLYREC

SEQ ID NO: 10817 - DNA, 123 bp, Streptococcus agalactiae
atgaaaattcagaaaattgtagaaaattttgattttttatgttttaatagtttttgtaattattatgttacaagaaaaggagatttttatgaacacaaaacagcgtttttcaatccggaaata

SEQ ID NO: 10818 - protein, 41 aa, Streptococcus agalactiae
MKIQKIVENFDFLCFNSFCNYYVTRKGDFYEHKTAFFNPEI

SEQ ID NO: 10819 - DNA, 141 bp, Streptococcus agalactiae
atgataccgttttctaacttgaaaatcaacacttattttcaaatattttcaatttgtcaagaaatatgcttacaaagactatcaaaagaggttacctgggtaacctcttttactatttcttattttttcttaagttcacct

SEQ ID NO: 10820 - protein, 47 aa, Streptococcus agalactiae
MIPFSNLKINTYFQIFSICQEICLQRLSKEVTWVTSFTISYFFLSSP

SEQ ID NO: 10821 - DNA, 147 bp, Streptococcus agalactiae
atgatctttttaaaagtgataaagatgatttttgtccgataccaactttatagaggcccttttcgcattcaaactttgataggatatttggataataatagtcaaacatatggtcagaaagtaaaagccagtattgattgggataat

SEQ ID NO: 10822 - protein, 49 aa, Streptococcus agalactiae
MIFLKVIKMIFVRYQLYRGPFRIQTLIGYLDNNSQTYGQKVKASIDWDN

SEQ ID NO: 10823 - DNA, 180 bp, Streptococcus agalactiae
ttgtacaacttgtcaaaaccacattcaggacaacgttcaggtggtccgactgcttcaactttaaacatcatatcggtttcattttcttgtggcggttctattgttttaatgtctggtagggataataagtctgacatattattcatcctttattactctgcggtgttaaggtatcaatta

SEQ ID NO: 10824 - protein, 60 aa, Streptococcus agalactiae
MYNLSKPHSGQRSGGPTASTLNIISVSFSCGGSIVLMSGRDNKSDILFILYYSAVLRYQL

SEQ ID NO: 10825 - DNA, 180 bp, Streptococcus agalactiae; identical to SEQ ID NO: 10823

SEQ ID NO: 10826 - protein, 60 aa, Streptococcus agalactiae; identical to SEQ ID NO: 10824

SEQ ID NO: 10827 - DNA, 105 bp, Streptococcus agalactiae
ttgccaaaagctataaaacgattcccaaataatttcttagtggcttttcccttgtcaactgcaatgggatttatgtacaaacatttttcaaattcgtggaaaaag

SEQ ID NO: 10828 - protein, 35 aa, Streptococcus agalactiae
MPKAIKRFPNNFLVAFPLSTAMGFMYKHFSNSWKK

SEQ ID NO: 10829 - DNA, 105 bp, Streptococcus agalactiae
ttgataactgctattgataataatattattgttttggctggggtccaaggttcttgtttgcttaccattaaccgtccaggtatctaccctgtaatctggattatt

SEQ ID NO: 10830 - protein, 35 aa, Streptococcus agalactiae
MITAIDNNIIVLAGVQGSCLLTINRPGIYPVIWII

SEQ ID NO: 10831 - DNA, 168 bp, Streptococcus agalactiae
atggttccaaaacaaggtacttttagcttgttcttgtggtgttgttttagagctgtgctgtttcgaatggttccaaaacacagctactgtaaattctgcttttacggttgttttagagctgtgctgtttcgaatggttccaaaactagtgcagttgtcaaggagattg

SEQ ID NO: 10832 - protein, 56 aa, Streptococcus agalactiae
MVPKQGTFSLFLWCCFRAVLFRMVPKHSYCKFCFYGCFRAVLFRMVPKLVQLSRRL

SEQ ID NO: 10833 - DNA, 93 bp, Streptococcus agalactiae
ttggtagctattcaatacatgaaatccgttaattttttcttctctgtttgcaatcagtatttttataaatctatcattgcaatgctcagatgg

SEQ ID NO: 10834 - protein, 31 aa, Streptococcus agalactiae
MVAIQYMKSVNFFFSVCNQYFYKSIIAMLRW

SEQ ID NO: 10835 - DNA, 108 bp, Streptococcus agalactiae
ttggaccaaccaaaagtcaacaacagcccaactaaagctgtcaaaccagcatttcctaaaacttcaaaggacccccttaatcctaagagttttcttctttctttgcct

SEQ ID NO: 10836 - protein, 36 aa, Streptococcus agalactiae
MDQPKVNNSPTKAVKPAFPKTSKDPLNPKSFLLSLP

SEQ ID NO: 10837 - DNA, 141 bp, Streptococcus agalactiae
atgggcaattcatcaaaatccaacagaaaggaggagctagatttgtctacctttgaggtcttaacactcatgtttatagcaggtaacttcgttatcgctctcgtgaagttagtccttgaactggtaaaatcgacaaaaaaa

SEQ ID NO: 10838 - protein, 47 aa, Streptococcus agalactiae
MGNSSKSNRKEELDLSTFEVLTLMFIAGNFVIALVKLVLELVKSTKK

SEQ ID NO: 10839 - DNA, 171 bp, Streptococcus agalactiae
atgaatagtaatgtttttgtcatccaatccatcaatgcattaccgattgtctggataaagtcaaataaaccagaaaaagttttcgtaatccaattggtcgttgactctacaaatggtgcgaccggtaacttatgttgtaataaattttccaaaatgatttgtcctctctat

SEQ ID NO: 10840 - protein, 57 aa, Streptococcus agalactiae
MNSNVFVIQSINALPIVWIKSNKPEKVFVIQLVVDSTNGATGNLCCNKFSKMICPLY

SEQ ID NO: 10841 - DNA, 189 bp, Streptococcus agalactiae
atgttaggcagaggcgcaaaagcatatctcaacacaacacacaaagcagataatatagcgactctagtcaatttagttaaagttgaattctttatcatgtctttaattatacctcaaaactatgactaccgcttaaaagtcttttttattacaatttcatttctaatgttacataaacgacctcttttt

SEQ ID NO: 10842 - protein, 63 aa, Streptococcus agalactiae
MLGRGAKAYLNTTHKADNIATLVNLVKVEFFIMSLIIPQNYDYRLKVFFITISFLMLHKRPLF

SEQ ID NO: 10843 - DNA, 132 bp, Streptococcus agalactiae
atgatttatacttgttcctatcataataaaaggaagatagtttatgtcaaaaaaaataatattaggaattttatctcttttatctgtcgttactttggtggcgtgtggttcatcagacaaacagctacaaga

SEQ ID NO: 10844 - protein, 44 aa, Streptococcus agalactiae
MIYTCSYHNKRKIVYVKKNNIRNFISFICRYFGGVWFIRQTATR

SEQ ID NO: 10845 - DNA, 249 bp, Streptococcus agalactiae
gtgctgtttcgaatggttccaaaactaattgccaatgcttacaatatcttcgtcagttttagagctgtgctgtttcgaatggttccaaaacatgttctgaattacctttctcgacactccggttttagagctgtgctgtttcgaatggttccaaaacaccatcaaggctcttatctgcagattgttagttttagagctgtgctgtttcgaatggttccaaaacaaatggttgccaatgactttctagag

SEQ ID NO: 10846 - protein, 83 aa, Streptococcus agalactiae
MLFRMVPKLIANAYNIFVSFRAVLFRMVPKHVLNYLSRHSGFRAVLFRMVPKHHQGSYLQIVSFRAVLFRMVPKQMVANDFLE

SEQ ID NO: 10847 - DNA, 213 bp, Streptococcus agalactiae
atggtaagcaaacaagaaccttggaccccagccaaaacaataatattattatcaatagcagttatcaaagggaatcatctaactctagtattacgaaaccaagctatacaatcactatcgggaatcagaaacaaattgtacaaaatgatgacggtaaaatccaacggtcttactttgaggcagaggcaacgtatcaacgaactctacaagaag

SEQ ID NO: 10848 - protein, 71 aa, Streptococcus agalactiae
MVSKQEPWTPAKTIILLSIAVIKGNHLTLVLRNQAIQSLSGIRNKLYKMMTVKSNGLTLRQRQRINELYKK

SEQ ID NO: 10849 - DNA, 132 bp, Streptococcus agalactiae
atgtgcgatcacggacgttttagagctgtgctgtttcgaatggttccaaaacttttaccaatgcttccatatcgcttatatgttttagagctgtgctgtttcgaatggttccaaaactggttatacatttac

SEQ ID NO: 10850 - protein, 44 aa, Streptococcus agalactiae
MCDHGRFRAVLFRMVPKLLPMLPYRLYVLELCCFEWFQNWLYIY

SEQ ID NO: 10851 - DNA, 168 bp, Streptococcus agalactiae
atgtatggtaaaaagaattggtggcaggtgtattcttcatcagtttattttctgaaaaaagagtataatataggtatcaaaaatgaaaacgttttagagaaggagactagaatatggcttctacaaataatgtttcagatacaaacacacgttttgctaaagaggagt

SEQ ID NO: 10852 - protein, 56 aa, Streptococcus agalactiae
MYGKKNWWQVYSSSVYFLKKEYNIGIKNENVLEKETRIWLLQIMFQIQTHVLLKRS

SEQ ID NO: 10853 - DNA, 120 bp, Streptococcus agalactiae
gtggccgatcaccctctcaggtcggctatgtatcgtcgccttggtgagcctttacctcaccaactagctaatacaacgcaggtccatctcacagtgaagcaattgctccttttaaataac

SEQ ID NO: 10854 - protein, 40 aa, Streptococcus agalactiae
MADHPLRSAMYRRLGEPLPHQLANTTQVHLTVKQLLLLNN

SEQ ID NO: 10855 - DNA, 120 bp, Streptococcus agalactiae; identical to SEQ ID NO: 10853

SEQ ID NO: 10856 - protein, 40 aa, Streptococcus agalactiae; identical to SEQ ID NO: 10854

SEQ ID NO: 10857 - DNA, 120 bp, Streptococcus agalactiae; identical to SEQ ID NO: 10853

SEQ ID NO: 10858 - protein, 40 aa, Streptococcus agalactiae; identical to SEQ ID NO: 10854

SEQ ID NO: 10859 - DNA, 120 bp, Streptococcus agalactiae; identical to SEQ ID NO: 10853

SEQ ID NO: 10860 - protein, 40 aa, Streptococcus agalactiae; identical to SEQ ID NO: 10854

SEQ ID NO: 10861 - DNA, 120 bp, Streptococcus agalactiae; identical to SEQ ID NO: 10853

SEQ ID NO: 10862 - protein, 40 aa, Streptococcus agalactiae; identical to SEQ ID NO: 10854

SEQ ID NO: 10863 - DNA, 120 bp, Streptococcus agalactiae; identical to SEQ ID NO: 10853

SEQ ID NO: 10864 - protein, 40 aa, Streptococcus agalactiae; identical to SEQ ID NO: 10854

SEQ ID NO: 10865 - DNA, 120 bp, Streptococcus agalactiae; identical to SEQ ID NO: 10853

SEQ ID NO: 10866 - protein, 40 aa, Streptococcus agalactiae; identical to SEQ ID NO: 10854

SEQ ID NO: 10867 - DNA, 102 bp, Streptococcus agalactiae
gtgatttttctttacaaatttttatcaagcgtaagtattcattggtttcaagaaattttatctctatttacgccccttattttttgctttaaccttagtgaa

SEQ ID NO: 10868 - protein, 34 aa, Streptococcus agalactiae
MIFLYKFLSSVSIHWFQEILSLFTPLIFCFNLSE

SEQ ID NO: 10869 - DNA, 117 bp, Streptococcus agalactiae
gtgggtatgggtatcaaatatttttatcatatcatcgttctttctttgcttatcgtagctacaagcattaatctttattattataacataagactgaagcattctgatcagaaagag

SEQ ID NO: 10870 - protein, 39 aa, Streptococcus agalactiae
MGMGIKYFYHIIVLSLLIVATSINLYYYNIRLKHSDQKE

SEQ ID NO: 10871 - DNA, 381 bp, Streptococcus agalactiae
gtgctgtttcgaatggttccaaaacgcgatgatggtaagtcatcatggacagcgtgttttagagctgtgctgtttcgaatggttccaaaacttttacacacgatgtcagatataatgtcaagttttagagctgtgctgtttcgaatggttccaaaacagtactgcactaggaattgtagagatcaaagttttagagctgtgctgtttcgaatggttccaaaaccgtaccatctatcaatttaccgcaagctgtgttttagagctgtgctgtttcgaatggttccaaaacttaaaagatttaaactatcaagcgtcaattgttttagagctgtgctgtttcgaatggttccaaaacttctaaatgctggtgactgctttgca

SEQ ID NO: 10872 - protein, 127 aa, Streptococcus agalactiae
MLFRMVPKRDDGKSSWTACFRAVLFRMVPKLLHTMSDIMSSFRAVLFRMVPKQYCTRNCRDQSFRAVLFRMVPKPYHLSIYRKLCFRAVLFRMVPKLKRFKLSSVNCFRAVLFRMVPKLLNAGDCFA

SEQ ID NO: 10873 - DNA, 114 bp, Streptococcus agalactiae
ttgaaaaaaatagtttctatgagaatctttttcttgacaataaaatttagctattataaaatagttctcacgataactaaaataatgattttttcagaaaataatattatttct

SEQ ID NO: 10874 - protein, 38 aa, Streptococcus agalactiae
MKKIVSMRIFFLTIKFSYYKIVLTITKIMIFSENNIIS

SEQ ID NO: 10875 - DNA, 96 bp, Streptococcus agalactiae
ttggtgatagaatttccattttaccaattgctatcaaagtgctataataatagagttaaaattaagattgcttgccaatatgagccagcaggttat

SEQ ID NO: 10876 - protein, 32 aa, Streptococcus agalactiae
MVIEFPFYQLLSKCYNNRVKIKIACQYEPAGY

SEQ ID NO: 10877 - DNA, 102 bp, Streptococcus agalactiae
atgttatttggttcttttttgttgaggagacaaggagaggtcttgatacaggtggttaaaatgagaggagtatttattaaagtatgctatactattttagta

SEQ ID NO: 10878 - protein, 34 aa, Streptococcus agalactiae
MLFGSFLLRRQGEVLIQVVKMRGVFIKVCYTILV

SEQ ID NO: 10879 - DNA, 108 bp, Streptococcus agalactiae
gtgttattatttcaatctcaaactttattaaatagttcaaggataggagaatattatgaaagaaaagaaaaatttggggataaaattaataaaatccctatatggtat

SEQ ID NO: 10880 - protein, 36 aa, Streptococcus agalactiae
MLLFQSQTLLNSSRIGEYYERKEKFGDKINKIPIWY

SEQ ID NO: 10881 - DNA, 252 bp, Streptococcus agalactiae
atgattgtttgtgatttcactaactatattaactatatcatagctatttgcaaaaggaaaattggaaaaaattatataagtatagcttttactaatattattgtggaaataatcataaaggtcagattgatagacttgtgctatactattactaagaaaaaaggacagatattatggatattagacaacttacttactttattgctgttgcagaagcaaaaaattattcacgcgctgcaaaaagtctttttg

SEQ ID NO: 10882 - protein, 84 aa, Streptococcus agalactiae
MIVCDFTNYINYIIAICKRKIGKNYISIAFTNIIVEIIIKVRLIDLCYTITKKKGQILWILDNLLTLLLLQKQKIIHALQKVFL

SEQ ID NO: 10883 - DNA, 123 bp, Streptococcus agalactiae
atgaggataccttcatatttttcattccacttttcttctttaacttcaaaggaagaataccattccctaagtagctcaactatttctataactatccctcctttatcttcaaatcaatatgat

SEQ ID NO: 10884 - protein, 41 aa, Streptococcus agalactiae
MRIPSYFSFHFSSLTSKEEYHSLSSSTISITIPPLSSNQYD

SEQ ID NO: 10885 - DNA, 90 bp, Streptococcus agalactiae
ttggctatttttttcttagtaataagcgaagaagtcataatttctcctttattttatattgaattgctgatgatttattatggtttagtg

SEQ ID NO: 10886 - protein, 30 aa, Streptococcus agalactiae
MAIFFLVISEEVIISPLFYIELLMIYYGLV

SEQ ID NO: 10887 - DNA, 135 bp, Streptococcus agalactiae
atgctggtgactgctttgcataaagttttagagctgtgctgtttcgaatggttccaaaacttgctgctagacccaaacagtttatttttaggttttagagctgtgctgtttcgaatggttccaaaactccttttt

SEQ ID NO: 10888 - protein, 45 aa, Streptococcus agalactiae
MLVTALHKVLELCCFEWFQNLLLDPNSLFLGFRAVLFRMVPKLLF

SEQ ID NO: 10889 - DNA, 105 bp, Streptococcus agalactiae
atgtcatcagttatcatcactctttttatgatagttaagatttttaaactatcatcttttgaaaaacatttcatcttgactatttctgttaataaatcagctcca

SEQ ID NO: 10890 - protein, 35 aa, Streptococcus agalactiae
MSSVIITLFMIVKIFKLSSFEKHFILTISVNKSAP

SEQ ID NO: 10891 - DNA, 108 bp, Streptococcus agalactiae
ttgaagattaagaaaaacaaggttttaatattatattatcagcgagtaggagatggtgagagccctacaatccctaatattgaaattatcattttcaatcattctacc

SEQ ID NO: 10892 - protein, 36 aa, Streptococcus agalactiae
MKIKKNKVLILYYQRVGDGESPTIPNIEIIIFNHST

SEQ ID NO: 10893 - DNA, 102 bp, Streptococcus agalactiae
atgttagccaatcttaaggataataattccaataaaaaaaggctaaccaaagttagtctccctttatctactccgccagtaggactcgaacctacgacatca

SEQ ID NO: 10894 - protein, 34 aa, Streptococcus agalactiae
MLANLKDNNSNKKRLTKVSLPLSTPPVGLEPTTS

SEQ ID NO: 10895 - DNA, 108 bp, Streptococcus agalactiae
ttgataaataatatttttgacaacttttttcattataacaagaaaaaagtaggagaacaattacttaactggttaattagaaaatttgttattttatcattaataact

SEQ ID NO: 10896 - protein, 36 aa, Streptococcus agalactiae
MINNIFDNFFHYNKKKVGEQLLNWLIRKFVILSLIT

SEQ ID NO: 10897 - DNA, 108 bp, Streptococcus agalactiae
atggtgaaaactgtttcttatcccaaagatttatggtttccaaaatatccctcgctttgttactatccttgcaaacctgaaaaatttcgtcataaactgttgaaaaaa

SEQ ID NO: 10898 - protein, 36 aa, Streptococcus agalactiae
MVKTVSYPKDLWFPKYPSLCYYPCKPEKFRHKLLKK

SEQ ID NO: 10899 - DNA, 93 bp, Streptococcus agalactiae
atgactactttatcagaattgcaagaaaaagcaacatgtcaaatatgcttctacatggacttgatggcgaaaaatcaattttgttatcagcaa

SEQ ID NO: 10900 - protein, 31 aa, Streptococcus agalactiae
MTTLSELQEKATCQICFYMDLMAKNQFCYQQ

SEQ ID NO: 10901 - DNA, 147 bp, Streptococcus agalactiae
atgtctcctctctttaagagtgaaagaaaaataaaaaataatttgattatcaaattatcatgctttgtattttatcataaacctagctttcatggcaagataaaaaataaaaaaacggaattaaacttcccgtttttaatagttatc

SEQ ID NO: 10902 - protein, 49 aa, Streptococcus agalactiae
MSPLFKSERKIKNNLIIKLSCFVFYHKPSFHGKIKNKKTELNFPFLIVI

SEQ ID NO: 10903 - DNA, 102 bp, Streptococcus agalactiae
ttgaataccattgcaaattggattttatttctgagagtaggttataaaagatggtatgctcttattccggttctttcaggttttagaaaacatgagagaact

SEQ ID NO: 10904 - protein, 34 aa, Streptococcus agalactiae
MNTIANWILFLRVGYKRWYALIPVLSGFRKHERT

SEQ ID NO: 10905 - DNA, 147 bp, Streptococcus agalactiae
ttgggtttaacaactagcaataacactccgctgattgtatcactattttctttaaaagttattttgtctagtattatgtccggtgtagcttacaatggagttatgtatctaatatttaaaaacaatgttgatattgaaaaagatgaa

SEQ ID NO: 10906 - protein, 49 aa, Streptococcus agalactiae
MGLTTSNNTPLIVSLFSLKVILSSIMSGVAYNGVMYLIFKNNVDIEKDE

SEQ ID NO: 10907 - DNA, 177 bp, Streptococcus agalactiae
ttgctaagagcaattgtcaaaatttctcagtctatgctagaagagttcttcttaatcccaatatgtcatttgtcacgattaacacggattggaaataacatcaatcaaattgcgcgtgctatcaaccaaagccatctaatttctcaggctcagtatcactttcatcgagaagcacgt

SEQ ID NO: 10908 - protein, 59 aa, Streptococcus agalactiae
MLRAIVKISQSMLEEFFLIPICHLSRLTRIGNNINQIARAINQSHLISQAQYHFHREAR

SEQ ID NO: 10909 - DNA, 195 bp, Streptococcus agalactiae
gtgaatcgtcttagagaatacagaattaaagctagcatatctcaattagctttagcaaaatcagttggtgtcgccagacaaacaataaaccttattgaaaataataaatacaatccttcgctagatctttgtataagactagcggaatgcctacaaacagacctcaatactcttttttgggatagtagacatcta

SEQ ID NO: 10910 - protein, 65 aa, Streptococcus agalactiae
MNRLREYRIKASISQLALAKSVGVARQTINLIENNKYNPSLDLCIRLAECLQTDLNTLFWDSRHL

SEQ ID NO: 10911 - DNA, 201 bp, Streptococcus agalactiae
ttgtgtcgtgttttacgtgtcaatcgctccacttactataaatttctaaaacataagccctcaaaaagagaattggataatcaaatttatagaaaacaaatacttgagatttataccaaagcgaacaaaagacttggtgtgaagtctatcaaggtcattcttcaaagagactatgacacaaaaatctctgaaggaagaatt

SEQ ID NO: 10912 - protein, 67 aa, Streptococcus agalactiae
MCRVLRVNRSTYYKFLKHKPSKRELDNQIYRKQILEIYTKANKRLGVKSIKVILQRDYDTKISEGRI

SEQ ID NO: 10913 - DNA, 216 bp, Streptococcus agalactiae
atggcattgaccccgttggacactgcatttttcgccccatctattgcattggaaatagtggattttatggaattccaaatattgcttgctgttgaaagtatcccattaaaaattcctgaaatcgtgctactcaaattattaaacaaatttgacccagttgagaccagtccagaccacaaattggaaagagtggaagtgaaacttgaccacagagac

SEQ ID NO: 10914 - protein, 72 aa, Streptococcus agalactiae
MALTPLDTAFFAPSIALEIVDFMEFQILLAVESIPLKIPEIVLLKLLNKFDPVETSPDHKLERVEVKLDHRD

SEQ ID NO: 10915 - DNA, 240 bp, Streptococcus agalactiae
ttggagttaatagtgagtaaaaaagataagaaaattgaaattcaaatttcagacgctcaagtaacagttaatggaactaaggttgatggataccaactcgttattggaaaaaaaattgtaggtcaaattgcagagctagattctaaatttgctgtgattaaaggtgagcaagtgagtggattctataaaaatttagatcaagctatgggaaatattattgaagaatataatcttaatcgc

SEQ ID NO: 10916 - protein, 80 aa, Streptococcus agalactiae
MELIVSKKDKKIEIQISDAQVTVNGTKVDGYQLVIGKKIVGQIAELDSKFAVIKGEQVSGFYKNLDQAMGNIIEEYNLNR

SEQ ID NO: 10917 - DNA, 303 bp, Streptococcus agalactiae
ttgttggaattatgttataatcttagtaattacagatatgacgcagaaaggaaaaaattattgaataaacaagagcgtttaggaatgagcgtttatctttactataatcgtgacgctcgtaaattatataaatacggagatgttcattatcattctcgtagattaagatatctagtcatttatgttaataaagaggatattgttagcgttagtaaagagataaaacatttaaaatttgttaaggatgttcggttatcagcaattgatgatattgatcaggattttgttggaaacttatatcgt

SEQ ID NO: 10918 - protein, 101 aa, Streptococcus agalactiae
MLELCYNLSNYRYDAERKKLLNKQERLGMSVYLYYNRDARKLYKYGDVHYHSRRLRYLVIYVNKEDIVSVSKEIKHLKFVKDVRLSAIDDIDQDFVGNLYR

SEQ ID NO: 10919 - DNA, 354 bp, Streptococcus agalactiae
gtgaaaaagaacatcgaatctggtgttgctcatattcacgctacattcaataacactattgttatgattacagatgtgcatggtaacgctcttgcatggtcatcagctggtgctcttggatttaaaggttctcgtaaatctactccatttgctgctcaaatggctgctgaagctgctgctaaatctgcacaagaacacggtcttaaaactgttgaagttactgtaaaaggtcctggttcaggtcgtgaatctgctatccgtgcccttgctgcagctggtcttgaagtaactgcaattcgtgatgtgactcctgtaccacataatggtgctcgtcctccaaaacgtcgtcgtgta

SEQ ID NO: 10920 - protein, 118 aa, Streptococcus agalactiae
MKKNIESGVAHIHATFNNTIVMITDVHGNALAWSSAGALGFKGSRKSTPFAAQMAAEAAAKSAQEHGLKTVEVTVKGPGSGRESAIRALAAAGLEVTAIRDVTPVPHNGARPPKRRRV

SEQ ID NO: 10921 - DNA, 408 bp, Streptococcus agalactiae
ttgccttaccaaagagctgcaagcctatatattcgcttttctgttttcgttatcgaaagaaatataaaaatggaagaagaattcgatgataatgacgagcaagatactatttatgctgttctttatgatgggaaacagccagtttcaacaggacgctttcttcctgaaactcaaacagaagctcgtttgactcgaattgcgactttaaaaggttatcgtggtaacggctatggtaccaaaattattatagcactagaaaattatgcaaaagaaaatggttatcactatctaactatacatgctgaattgacagcaaaagatttctaccagacacttgggtatcaagctactgggaatatttatatggaagacggggaagcctgtcaaacactcgaaaaatatttaatt

SEQ ID NO: 10922 - protein, 136 aa, Streptococcus agalactiae
MPYQRAASLYIRFSVFVIERNIKMEEEFDDNDEQDTIYAVLYDGKQPVSTGRFLPETQTEARLTRIATLKGYRGNGYGTKIIIALENYAKENGYHYLTIHAELTAKDFYQTLGYQATGNIYMEDGEACQTLEKYLI

SEQ ID NO: 10923 - DNA, 501 bp, Streptococcus agalactiae
ttgaaattaaataaaataatattatctactgcagctcttactgctctctttttaggatataatagcgttactgcggatacatataataactatcagccacatagatcaaataatatggatttaactgaggaatataactataataaccagatagaacttcaggagcgtataaaaaaactaaatataccttttaaagaaaaacttgccttacttagaaaggttaaatcaagacaagattcttatgtattagacacattaagaaaagaagttgaaaataaaaacagtgagtattcagaactagagcaagaatatcaaagaatttcagctcttattgatgctaagtttccgcaagggaaatctagtttagcagaaaaattacataaagaactaatttgggacttggatggtgttaaatatgatgagggtatttctaagagaactgctctaaaaaaattagaaggtaaaatcaacgaatatactaaaaaatacagttatttattc

SEQ ID NO: 10924 - protein, 167 aa, Streptococcus agalactiae
MKLNKIILSTAALTALFLGYNSVTADTYNNYQPHRSNNMDLTEEYNYNNQIELQERIKKLNIPFKEKLALLRKVKSRQDSYVLDTLRKEVENKNSEYSELEQEYQRISALIDAKFPQGKSSLAEKLHKELIWDLDGVKYDEGISKRTALKKLEGKINEYTKKYSYLF

SEQ ID NO: 10925 - DNA, 495 bp, Streptococcus agalactiae
ttgataaccttaaaatctcaacctcaagcttacaaatcagaagttgactgtaaacttttagaggcttttataaaaactaaagcttatcaaaatagttgtgtaattgctacttacctatcttttgactacgaatacaatacacaacttcttattaaacaagctttatgtgatggcaaacgtgtccttgttcccaaaacttatccaaaaggtaaaatgatttttgtggactatcaaaaagataacttgaggacaacaccgtttggcttattagaacctgttaatgatagagctgttgaaaaagctagtatagacttaattcatgtgcccggacttatctttaacaataaaggttttcgtataggttatggtgcaggttattttgatcgctatttgagtgattttgaaggtgatactattagtactatttataggtgtcagagacaggattttgtagaagagaagcatgacgtagcagttaaggaggtattatgtcta

SEQ ID NO: 10926 - protein, 165 aa, Streptococcus agalactiae
MITLKSQPQAYKSEVDCKLLEAFIKTKAYQNSCVIATYLSFDYEYNTQLLIKQALCDGKRVLVPKTYPKGKMIFVDYQKDNLRTTPFGLLEPVNDRAVEKASIDLIHVPGLIFNNKGFRIGYGAGYFDRYLSDFEGDTISTIYRCQRQDFVEEKHDVAVKEVLCL

SEQ ID NO: 10927 - DNA, 507 bp, Streptococcus agalactiae
ttgatagacaaacagtctattggtaaaggtggtgtcggcgacattccagtagtgaaaacacatattgtaaaagtattactcgaccagattgaccaacctcaaccagaagtgccacggtttgtggctgattggtacgagaagcataaagatagcttagagtgcgatttatatttatatcacatgtcgatatacgatgaagaagtcgaaaaagatgacttctattactggatgcaaacatcaaaaaatccagtctacacacttattaatatgcaccaattcggctacaccatccaaaaagagaagctgtatacggttgagatacctaatccgaatgaaagacagttaagttttgtgctgatgagacaacttagcggaaatgtaagtatcaaagttatgcatagagataacttagacttactaaagacagataatgatttacaactaacagaatccgaaatccgcaaagatttcgactgggcgtggcagtttagagaagaggtggtggaa

SEQ ID NO: 10928 - protein, 169 aa, Streptococcus agalactiae
MIDKQSIGKGGVGDIPVVKTHIVKVLLDQIDQPQPEVPRFVADWYEKHKDSLECDLYLYHMSIYDEEVEKDDFYYWMQTSKNPVYTLINMHQFGYTIQKEKLYTVEIPNPNERQLSFVLMRQLSGNVSIKVMHRDNLDLLKTDNDLQLTESEIRKDFDWAWQFREEVVE

SEQ ID NO: 10929 - DNA, 468 bp, Streptococcus agalactiae
ttgtgtgttgtgttgagatatgcttttgcgcctctgcctaacattcagccaattactgccatttttttgattacagttgtcttattcgatttaaaagaaggtgtagctactgtaactataacaatgctagtttcttcttttttaatgggctttgggccatgggtctttttgcaaatcatttccttcactttaattttatgcttgtggaaatttctgatatatccgctgacaaaagctgtatgttttggtaaaataacggaggtagtacttcaaactttctttgcaggagggttaggggttgtttatggcgtcattattgatacctgttttgcttggttatatcatatgccttggtggacttatgtattagcaggacttagttttaatatggcacacgctttatcaacttgtttattttatcctcttttgttaccgattttaaggagatttaggaatgaaaaaatacat

SEQ ID NO: 10930 - protein, 156 aa, Streptococcus agalactiae
MCVVLRYAFAPLPNIQPITAIFLITVVLFDLKEGVATVTITMLVSSFLMGFGPWVFLQIISFTLILCLWKFLIYPLTKAVCFGKITEVVLQTFFAGGLGVVYGVIIDTCFAWLYHMPWWTYVLAGLSFNMAHALSTCLFYPLLLPILRRFRNEKIH

SEQ ID NO: 10931 - DNA, 474 bp, Streptococcus agalactiae
gtgaatttaccgtctactgaaccacctttgatttcaagagcttctgcatctttagcgaaatcgctaataactttagctggtgcaataacatcttcgttagaaaacgcaactgctgatggaccaacaaaaagttctttaaggtcttcaagacctgctttttcagctgcacgagttaaaattgagtttttgataactttaaactcaacatcgctttcacgaagtgaacgacgtaagttagtatcttgctcaacagtaagaccacgtgaatcaacaacaacgatacttgctgctgctttcattttctcagcaataagttcaacttgttcagctttttttgcaataattgcttcactcattagttttacctccgtttttattttttgggataagcacaaaaaaatcgcacctaaacctagacacgaaagtacaatacgttattttataatgacgttttgtgcctcggtaggaatatta

SEQ ID NO: 10932 - protein, 158 aa, Streptococcus agalactiae
MNLPSTEPPLISRASASLAKSLITLAGAITSSLENATADGPTKSSLRSSRPAFSAARVKIEFLITLNSTSLSRSERRKLVSCSTVRPRESTTTILAAAFIFSAISSTCSAFFAIIASLISFTSVFIFWDKHKKIAPKPRHESTIRYFIMTFCASVGIL

SEQ ID NO: 10933 - DNA, 603 bp, Streptococcus agalactiae
gtggcgcgcgatccatatagtgatagatcgagatatttagatccaaaagttctatcatcctcttttggcgccttttttccagcagataatattaaggtagcttggtctaacaactccagcactttatttacaccacctattaatgcaaactacaccactcagattcaagctattgggacaacgattaagtcacaaattccggaatcgattttgacggttacggataaaaagagcaggaagttcagcattaacaagattgacgaagctaaagaaggcttagtaggtgcgaccttcaccttgtctaaacgcacaacagtagcggcagatcatcaagtacaaggagatttcattcctgtcagcaaagagacgacagtcggtcggacaacccttacctttgacaaccttaaacctggattttatgaccttaaagaaacgaaagcgccgaatgcttacgtacttgatcctaagacttatgttgtggtcgttcaaaattcaggaaaaacgacaattgtggatgaagctaacttcaaagaggctgattacccaatggctgataataccagccatgtggagtgcgtagcgttgctacaacgaagcaaaggg

SEQ ID NO: 10934 - protein, 201 aa, Streptococcus agalactiae
MARDPYSDRSRYLDPKVLSSSFGAFFPADNIKVAWSNNSSTLFTPPINANYTTQIQAIGTTIKSQIPESILTVTDKKSRKFSINKIDEAKEGLVGATFTLSKRTTVAADHQVQGDFIPVSKETTVGRTTLTFDNLKPGFYDLKETKAPNAYVLDPKTYVVVVQNSGKTTIVDEANFKEADYPMADNTSHVECVALLQRSKG

SEQ ID NO: 10935 - DNA, 576 bp, Streptococcus agalactiae
gtgcaatcgaatagacaccgtggactaattgagaagccttatcatatcactttaattgagccaagcgatgaagaaatttatcgcttttctgctcttttgaaccgtgaaaagttttggttggaaaatgaacaggaaccaactattaggctttggtgttataaggttgatagctttgagattggaaaagacgaatttggtgcctgggtggtcgatgttaccttcatctgccaccctaccaagtttttcaagaccactgacatccagacattgactggtaatggggttttgagggttcaagggtcagctcttgcttttccgaagattacagtggttggtcagagcgcttctgagacatcgtttacgataggtaaccaagtgattaagcttgaaaagctctcagaatcgctcgtgatgaccaatgatcctgacaatcctagctttaagacggctagtggaaaactcattaagtgggctggtgattttatcacagttgatactgctaaggggcagaatgtcggtgttgttttaggtgctggcataacatctttgaaatttgaaacagtttgggggtgggca

SEQ ID NO: 10936 - protein, 192 aa, Streptococcus agalactiae
MQSNRHRGLIEKPYHITLIEPSDEEIYRFSALLNREKFWLENEQEPTIRLWCYKVDSFEIGKDEFGAWVVDVTFICHPTKFFKTTDIQTLTGNGVLRVQGSALAFPKITVVGQSASETSFTIGNQVIKLEKLSESLVMTNDPDNPSFKTASGKLIKWAGDFITVDTAKGQNVGVVLGAGITSLKFETVWGWA

SEQ ID NO: 10937 - DNA, 762 bp, Streptococcus agalactiae; identical to SEQ ID NO: 10777

SEQ ID NO: 10938 - protein, 254 aa, Streptococcus agalactiae; identical to SEQ ID NO: 10778

SEQ ID NO: 10939 - DNA, 681 bp, Streptococcus agalactiae
gtgagtccagattatgctccctttgagtttaaagcgcttgttaatgggaaagataaagttgtcggcgcagatattgagttagctcaagctattgctgatgagcttcatgtcaaactagaggtatctcctatgagttttgacaatgttttatcaagtttacaaacaggtaaggctgatatggctatttctggattatcatatactaaagagcgtgctaaagtctatgatttttcaaaaccttattacactacagaaaatgcggttcttgttaggaagtctgatttaggaaaatatacttcaatcgaaagccttaaaggtaaaaaaatagcagtacaaaaaggaagtatcgaagagggagtttctaagaaatcattcaaaaattctcacgtcgtgtcactgacagcgatgggagaagcgattagtgagttaaaatcaggcaaggtagaagctgttgatttagaaaaaaccgtagctgaaggttacttggcccagaatccagaccttgttcttgctaagtttgcccttaaaacaggagaaggggatgctaaggctgtagctttacctaaagacagtggaaaaatgttgaagactgttaacaaagtgataaagagacttgaaaaagaagataaatataaagtttatatttcagatgcggctaaattaactggcaatcaagttgaa

SEQ ID NO: 10940 - protein, 227 aa, Streptococcus agalactiae
MSPDYAPFEFKALVNGKDKVVGADIELAQAIADELHVKLEVSPMSFDNVLSSLQTGKADMAISGLSYTKERAKVYDFSKPYYTTENAVLVRKSDLGKYTSIESLKGKKIAVQKGSIEEGVSKKSFKNSHVVSLTAMGEAISELKSGKVEAVDLEKTVAEGYLAQNPDLVLAKFALKTGEGDAKAVALPKDSGKMLKTVNKVIKRLEKEDKYKVYISDAAKLTGNQVE

SEQ ID NO: 10941 - DNA, 690 bp, Streptococcus agalactiae
gtgtgtcaaaacattgcatggcctaaactgagtgctcaaacgaaaattataattgattatttttctactttaactgtttcagacttagaggatatctacagaattaatacaagtgcagctcgttgtgaggctcaaagatggcaagattttaaagctaaacaacttactctgaatcctgctattaagttattcaacggtcttatgtaccgcaatatcaaaaggcacaacttatccacaagtgaagcacaatttatggaaaattctgtttttattactagtgctctttatggcatcattcctgctatgacactaatatcccctcatcgtttagattttaacactaaaatcaaaatcaacaataactctcttaaagttttttggcgtgaaaattacgatacttttatgcagtcagatgacattatggtttctttgctttctaatgaatttgaaactgtcttttctcctaaagagcgtcaaaaactaatacatcttaactttattgaagatcgagatggccaattaaaaacccactctaccatatcaaaaaaagcaagaggaaagtgtttaactgctatgatggaaaataattgccaaactctagaacacttaaagcaattacgctttgatggcttctgttatgataatgaactctcagactctaagcaattaacttttgttaaaaaacagact

SEQ ID NO: 10942 - protein, 230 aa, Streptococcus agalactiae
MCQNIAWPKLSAQTKIIIDYFSTLTVSDLEDIYRINTSAARCEAQRWQDFKAKQLTLNPAIKLFNGLMYRNIKRHNLSTSEAQFMENSVFITSALYGIIPAMTLISPHRLDFNTKIKINNNSLKVFWRENYDTFMQSDDIMVSLLSNEFETVFSPKERQKLIHLNFIEDRDGQLKTHSTISKKARGKCLTAMMENNCQTLEHLKQLRFDGFCYDNELSDSKQLTFVKKQT

SEQ ID NO: 10943 - DNA, 954 bp, Streptococcus agalactiae
ttggtagaacgtacacttcgtccgcagtatttaagagagtatattggacaagataaggttaaagatcagctaaaaatatttattgaagctgctaaattgcgtgatgagtcattggatcatgtgttattatttggccctcctggtttagggaaaacaaccatggcatttgtaattgctaatgagttgggtgtcaatctcaaacaaacatcaggtcccgcaattgaaaaatcaggggatttagtagccattttaaatgatttagaaccaggtgatgttctttttattgatgaaattcatcgtatgccgatggcggttgaagaggtactttatagtgcaatggaagacttctatattgacattatgatcggtgcaggagaaactagtagaagtgttcatctagatttgccgccctttaccttaattggtgcaacgacacgtgcaggtatgttatctaatcccttacgtgctcgctttggtattacagggcatatggagtattatgaagaaaatgatttgacagaaattattgagcgtacagcagacatttttgaaatgaaaattacttatgaagctgcttctgaattagcgcgtcgcagtcgtggaacgccacgtatcgctaaccgtttattgaaacgtgttcgagattatgctcaaatcatgggagatggtttgatagatgacaatattacagataaagcattaacgatgttagatgttgatcacgaggggcttgattacgtcgatcaaaaaatcttaagaaccatgattgaaatgtataatggaggtcctgttggtttaggaactctatccgttaatattgctgaagaacgagatactgttgaagacatgtacgaaccttatttaattcaaaaaggttttattatgcgtacccgtaccggtcgtgtagctacggttaaggcatatgaacatttaggttatcagcgatttgataaa

SEQ ID NO: 10944 - protein, 318 aa, Streptococcus agalactiae
MVERTLRPQYLREYIGQDKVKDQLKIFIEAAKLRDESLDHVLLFGPPGLGKTTMAFVIANELGVNLKQTSGPAIEKSGDLVAILNDLEPGDVLFIDEIHRMPMAVEEVLYSAMEDFYIDIMIGAGETSRSVHLDLPPFTLIGATTRAGMLSNPLRARFGITGHMEYYEENDLTEIIERTADIFEMKITYEAASELARRSRGTPRIANRLLKRVRDYAQIMGDGLIDDNITDKALTMLDVDHEGLDYVDQKILRTMIEMYNGGPVGLGTLSVNIAEERDTVEDMYEPYLIQKGFIMRTRTGRVATVKAYEHLGYQRFDK

SEQ ID NO: 10945 - DNA, 1233 bp, Streptococcus agalactiae
ttgaaaaaaattattacttctattctattacttagttgcattttttttatgccaaccatctctgctgaatcttttaatgcttccgctaaacatgccttggcagttgatttagattcaggaaaaatcttgtatgaaaaagatgctaacaaacccgctgctattgcttccttgactaaaataatgaccgtttatatggtctataaagaaattgataacggtaacctcaagtggaataccaaagtaaatatatctgactacccttatcaactaacacgcgaatctgatgctagtaatgttcctttagaaaaaaggcgctatactgttaaacagctcgtggacgctgccatgatttctagtgctaacagtgcagccattgctttggctgaacatatttcaggaaccgaaagtaaatttgttgataaaatgactgctcaattggaaaagtggggaattcatgatagccacctagtcaatgcttctggcttaaataatagtatgttaggcaatcacatttatccaaaatcgtcacaaaacgacgaaaataaaatgagtgcacgtgatattgctattgttgcctaccatttggtcaacgaatatccttccattcttaagattactagtaagtccgttgctaaatttgataaagatattatgcattcttataactacatgctaccagatatgcctgtctttagaccaggtattacaggtttgaaaactgggacaacggaattagctggccaatcttttattgctacatctactgaaagtggaatgagactactcactgttattatgcatgctgataaggccgataaagacaaatatgctcgctttacagcaactaactctctcttgaactatatcacaaacacctacgaacctaaccttgtattagctaaaggagctgcatataaaggtaaagaagcaagtgtgagagacggaaaagaacaatcggtcatcgctgttgctaaaaacgatttgaaagtagtacagaagaaaaatatcactaaacaaaatcagttaaaaattaactttaaaaaagagcttactgctcctattacaaaaaaagagaacctagggaaagcttattacgttgaccttaataaggttggaaaaggctatctcataaaggaacctagcgttcatttagtggcaaaagatagtattgagcgcagtttcttcctcaaagtgtggtggaatcattttgtgcgctacgttaacgaaaaactt

SEQ ID NO: 10946 - protein, 411 aa, Streptococcus agalactiae
MKKIITSILLLSCIFFMPTISAESFNASAKHALAVDLDSGKILYEKDANKPAAIASLTKIMTVYMVYKEIDNGNLKWNTKVNISDYPYQLTRESDASNVPLEKRRYTVKQLVDAAMISSANSAAIALAEHISGTESKFVDKMTAQLEKWGIHDSHLVNASGLNNSMLGNHIYPKSSQNDENKMSARDIAIVAYHLVNEYPSILKITSKSVAKFDKDIMHSYNYMLPDMPVFRPGITGLKTGTTELAGQSFIATSTESGMRLLTVIMHADKADKDKYARFTATNSLLNYITNTYEPNLVLAKGAAYKGKEASVRDGKEQSVIAVAKNDLKVVQKKNITKQNQLKINFKKELTAPITKKENLGKAYYVDLNKVGKGYLIKEPSVHLVAKDSIERSFFLKVWWNHFVRYVNEKL

SEQ ID NO: 10947 - DNA, 1041 bp, Streptococcus agalactiae; identical to SEQ ID NO: 8531

SEQ ID NO: 10948 - protein, 347 aa, Streptococcus agalactiae
MNRKIIGLTLLSLSVLTLTACGNRSDKSANKSDIKVAMVTNQGGVDDKSFNQSAWEGLQKWGKKKGLTKGNGFDYFQSSNESDHANNLDTAASSGYNLIFGIGFGLHDTIEKVSENNKDVKYVIVDDIIKGKENVASVTFADNEAAYLAGVAAAKTTKTKTVGFIGGMEGVVVKRFEAGFKAGVKSIDPAIKVAVSYAGSFTDAAKGKTIAATQYATGVDVIYQAAGGTGAGIFSEAKTENETRKESNKVWVIGVDRDQSQEGNYVSKDGKKANFVLASTIKEVGKSLQSVAELTEKKQYPGGKVTVFGLKDSGVDIKEHQLSSEGSVAVKKAKEDIVSGKIQVPMK

SEQ ID NO: 10949 - DNA, 909 bp, Streptococcus agalactiae
ttgacagcgacagctgaatctattgaacaagtaaagcaattgctagcaataggaattgaccgcatctatgtaggggaagaaaattacggtcttcgtttaccacattcattttcagacgatgaattgcgtgaaatcgctaaattagtacatgatgctggtaaagaattgacagtagcttgtaatgcactcatgcatcaagagatgatggataatatcaaaccatttttggagttgatgaaagaaattaatgtggattatttggtagttggtgatgcaggagtattttatatcaacaagcgtgatggttataacttcaaacttatctacgacacttctgtcttcgttacatcaagtcgtcaagttaatttttggggacaacatggagcagtagaaacggttttagcacgtgaaataccttctgaagaactttttaagatgtctgagaatcttgaatttcctgctgagattttagtttatggggcttctgtaattcatcactctaagcgtccgttattgcaaaactattataattttactcatatcactgatgaaaaaacacgtgagcgtggtctttttttagcagaaccaggtgatccagaaagtcactattctatttacgaagataagcatgggactcatatttttattaacaatgatatcaatatgatgactaaagtgactgaactagttgaacatcactttactcactggaaattagatggtatttattgtccaggagataattttgttgctattgctgaaatttttgtcgaaacagctcgtttgattgaaaatggaacattcactcaggatcaggctttcttgtttgatgaacgaattagaaaactgcaccctaaaggacgtggtttagatactggattttatgattttgacccatcaacagtaaaa

SEQ ID NO: 10950 - protein, 303 aa, Streptococcus agalactiae
MTATAESIEQVKQLLAIGIDRIYVGEENYGLRLPHSFSDDELREIAKLVHDAGKELTVACNALMHQEMMDNIKPFLELMKEINVDYLVVGDAGVFYINKRDGYNFKLIYDTSVFVTSSRQVNFWGQHGAVETVLAREIPSEELFKMSENLEFPAEILVYGASVIHHSKRPLLQNYYNFTHITDEKTRERGLFLAEPGDPESHYSIYEDKHGTHIFINNDINMMTKVTELVEHHFTHWKLDGIYCPGDNFVAIAEIFVETARLIENGTFTQDQAFLFDERIRKLHPKGRGLDTGFYDFDPSTVK

SEQ ID NO: 10951 - DNA, 927 bp, Streptococcus agalactiae; identical to SEQ ID NO: 10781

SEQ ID NO: 10952 - protein, 309 aa, Streptococcus agalactiae; identical to SEQ ID NO: 10782

SEQ ID NO: 10953 - DNA, 1434 bp, Streptococcus agalactiae
gtgcgttatgcaccaagtccaacaggattgttacacatcggaaatgcgcgtactgcgctctttaactacctttatgctcgccatcatggtggggattttgttattcgtattgaagatactgaccgaaaacgccacgtcgaagatggtgaacgctctcaattggagaacttacgttggctaggtatggactgggatgaaagtcctgaaacacatgaaaattatcgtcaatcagaacgccttgagctctaccaacgttatattgatcagttgttagcagaaggtaaagcctacaagtcctatgtgactgaggaagaattagcagcagagcgtgaacgccaagaattggcaggcgaaacacctcgctatatcaacgaatttatcggaatgtcagaaactgaaaaagaagcttacattgcagagcgtgaagcagcaggcatcattccgacagtacgccttgctgttaatgaatctgggatttataaatggactgatatggtaaaaggtgacattgagtttgaaggctctaatatcggcggagactgggttattcagaagaaagatggttatccaacttacaatttcgcagtagtcattgatgatcatgacatgcaaatttcgcatgttatccgtggcgatgaccatattgcaaatacgccaaaacaattaatggtttatgaagcactcggttgggaagcgccacaatttggtcacatgacattgattataaactcagagactggtaagaaattatcaaaacgcgacaccaatactcttcaatttatcgaagactatcgtaaaaaaggttatatgtcggaagctgtctttaatttcattgcccttcttggctggaatcctggtggagaagaagaaatcttctcacgcgagcaattaattaatctatttgatgaaaatcgtcttagcaaatcaccagcagcattcgatcagaagaaaatggattggatgagtaatgattacctaaaaaatgctgattttgagagtgtttttgcactttgcaaaccattcttagaagaagctggtcgacttacagacaaagctgaaaaattagttgagctttatcaacctcaattaaaatcagctgatgagattgtaccattaacagaccttttctttgcagattttccagaactaacagaagccgaaaaagaagtaatggcagctgaaacagtcccaacagtcttatctgcttttaaggaaaagttagtatcgctttctgacgaagaattcactagagatactattttccctcaaattaaggctgttcaaaaagaaacaggtattaaaggtaagaacctatttatgcctattcgtattgcggtttctggtgaaatgcatggaccagagttaccagatactatttatttattaggtaaagaaaaatcagttcaacatatcgataatatgttagcaaaatta

SEQ ID NO: 10954 - protein, 478 aa, Streptococcus agalactiae
MRYAPSPTGLLHIGNARTALFNYLYARHHGGDFVIRIEDTDRKRHVEDGERSQLENLRWLGMDWDESPETHENYRQSERLELYQRYIDQLLAEGKAYKSYVTEEELAAERERQELAGETPRYINEFIGMSETEKEAYIAEREAAGIIPTVRLAVNESGIYKWTDMVKGDIEFEGSNIGGDWVIQKKDGYPTYNFAVVIDDHDMQISHVIRGDDHIANTPKQLMVYEALGWEAPQFGHMTLIINSETGKKLSKRDTNTLQFIEDYRKKGYMSEAVFNFIALLGWNPGGEEEIFSREQLINLFDENRLSKSPAAFDQKKMDWMSNDYLKNADFESVFALCKPFLEEAGRLTDKAEKLVELYQPQLKSADEIVPLTDLFFADFPELTEAEKEVMAAETVPTVLSAFKEKLVSLSDEEFTRDTIFPQIKAVQKETGIKGKNLFMPIRIAVSGEMHGPELPDTIYLLGKEKSVQHIDNMLAKL

SEQ ID NO: 10955 - DNA, 1830 bp, Streptococcus agalactiae; identical to SEQ ID NO: 10775

SEQ ID NO: 10956 - protein, 610 aa, Streptococcus agalactiae; identical to SEQ ID NO: 10776

SEQ ID NO: 10957 - DNA, 1371 bp, Streptococcus agalactiae; identical to SEQ ID NO: 10779

SEQ ID NO: 10958 - protein, 457 aa, Streptococcus agalactiae; identical to SEQ ID NO: 10780

SEQ ID NO: 10959 - DNA, 2724 bp, Streptococcus agalactiae
gtggttgagcaagctcaatcgcttggcttacctgtaaaaagtcatgcttctagcgttgaagaaaatgatgctacacgtattgttgagagttttagctcttctaaaactaaagctccaacaaattctgttcaaactaatcaaggtgtgaaaacagaatctaaaactgttgaaaccaaacaaggcttgtccgatgataaaccttcaactcaacctgtagctaaaccgaaaccacaaagtcgtaactttaaggcggagcgcgaggctcgtgctaaagctgaagcggagaagcgtcaacataatggggatcaccgtaagaataatcgccataatgatacacgctctgacgacagacgccatcaaggtcaaaagcgttcaaatggtaatcgtaatgataaccgacaaggtcagcaaaataaccgtaataaaaatgatgggcgttatgctgatcataaacagaaaccccaaacgcgtcctcagcaacctgcaggcaatcgcattgactttaaagctcgagcagcagctttgaaagctgagcaaaatgctgaatactcacgtcatagtgagcagcgtttccgtgaagagcaagaagccaaacgtcaagcagctaaggagcaagaactagctaaagcagcagcgttaaaagcgcaagaagaagctcaaaaagctaaggaaaaacttgcttctaaacctgttgctaaggtaaaagaaattgtcaataaagtagccgctacgccatcacagacagcagatagtcgtcgtaaaaaacaaactcgttctgataagtctcgtcaattttcaaatgaaaatgaagatggacaaaagcaaacaagaaataagaaaaactggaataatcaaaaccaagtgagaaatcaaagaaatagtaactggaatcataataagaaaaataaaaaaggtaagactaatggagctccaaaaccagtaacagagcgtaaattccatgaattaccaaaagaatttgaatatactgagggcatgaccgttgcggaaattgcaaaacgtattaaacgcgaaccagcggaaattgttaaaaaactctttatgatgggagttatggcaacgcagaatcaatcattagatggagacactattgagctattgatggttgactacgggattgaagcacatgctaaggttgaagttgatgaagctgatattgaacgcttctttgcagatgaggattaccttaatcctgataacttaacggaacgtccgcctgttgttactatcatgggacacgttgatcatggtaaaacaactcttcttgatactctacgtaattcacgtgtcgctactggcgaagctggtggaattactcaacatattggtgcttatcagattgaagaagctggcaagaaaattactttcttggatacaccagggcatgcggcctttacttctatgcgtgcgcgtggtgcatcagtaactgatattactatccttatcgttgccgctgatgatggtgttatgccgcagacagttgaggcaattaatcactctaaagctgcgggtgtcccaattattgttgctatcaacaaaattgataaacctggtgcaaatccagaacgcgttatcagtgaattagctgagcatggtgtcatctctactgcatggggtggtgagtctgaatttgttgaaatttcagctaagtttggtaaaaatattcaagaattacttgagacagttcttttagttgctgaaatggaagaattaaaagcagatgcagatgttcgtgctattggtactgttattgaagcccgtcttgataaaggtaagggagccgttgcaacgcttcttgtccaacaaggtactttaaatgtacaagatccaatcgttgttggtaatacatttggacgtgttcgtgcgatgactaatgatcttgggcgtcgtgtcaaagttgcgggtccatctacaccagtttctattactggtttgaacgaagctccaatggctggtgatcattttgctgtttatgcagatgagaaagctgcgcgtgctgcaggtgaagaacgtgcaaaacgtgctctcttaaaacaacgccaaaacacgcaacgtgttagcctcgagaacttatttgatacccttaaagctggtgaagttaagtcagttaatgttattatcaaagctgatgtgcaaggttctgtagaagcacttgcagcttctctccttaagattgatgttgaaggagtaaaagttaacgttgttcactcagcagttggtgctattaatgagtctgatgtaacacttgctgaagcatcaaatgctgttattataggatttaacgtacgccctactccacaagctcgtcaacaagcagatgctgatgatgtcgaaattcgtcaacatagcattatctataaagttatcgaagaagttgaagaagcgatgaaaggtaaacttgatcctgaataccaagaaaaaatccttggtgaagccattattcgtgagacctttaaagtttcaaaagtgggaactattggtggatttatggttatcaatggtaaagttactcgtgattcaagtgttcgtgttatccgtgatggtgttgtcatttttgatggtaaattagcaagtcttaaacactataaagatgatgttaaagaagtcggcaatgctcaagaaggtggtctaatgattgagaattataacgatctcaaagaagatgacactattgaagcatacattatggaagaaattaaacgtaaa

SEQ ID NO: 10960 - protein, 908 aa, Streptococcus agalactiae
MVEQAQSLGLPVKSHASSVEENDATRIVESFSSSKTKAPTNSVQTNQGVKTESKTVETKQGLSDDKPSTQPVAKPKPQSRNFKAEREARAKAEAEKRQHNGDHRKNNRHNDTRSDDRRHQGQKRSNGNRNDNRQGQQNNRNKNDGRYADHKQKPQTRPQQPAGNRIDFKARAAALKAEQNAEYSRHSEQRFREEQEAKRQAAKEQELAKAAALKAQEEAQKAKEKLASKPVAKVKEIVNKVAATPSQTADSRRKKQTRSDKSRQFSNENEDGQKQTRNKKNWNNQNQVRNQRNSNWNHNKKNKKGKTNGAPKPVTERKFHELPKEFEYTEGMTVAEIAKRIKREPAEIVKKLFMMGVMATQNQSLDGDTIELLMVDYGIEAHAKVEVDEADIERFFADEDYLNPDNLTERPPVVTIMGHVDHGKTTLLDTLRNSRVATGEAGGITQHIGAYQIEEAGKKITFLDTPGHAAFTSMRARGASVTDITILIVAADDGVMPQTVEAINHSKAAGVPIIVAINKIDKPGANPERVISELAEHGVISTAWGGESEFVEISAKFGKNIQELLETVLLVAEMEELKADADVRAIGTVIEARLDKGKGAVATLLVQQGTLNVQDPIVVGNTFGRVRAMTNDLGRRVKVAGPSTPVSITGLNEAPMAGDHFAVYADEKAARAAGEERAKRALLKQRQNTQRVSLENLFDTLKAGEVKSVNVIIKADVQGSVEALAASLLKIDVEGVKVNVVHSAVGAINESDVTLAEASNAVIIGFNVRPTPQARQQADADDVEIRQHSIIYKVIEEVEEAMKGKLDPEYQEKILGEAIIRETFKVSKVGTIGGFMVINGKVTRDSSVRVIRDGVVIFDGKLASLKHYKDDVKEVGNAQEGGLMIENYNDLKEDDTIEAYIMEEIKRK

SEQ ID NO: 10961 - DNA, 2793 bp, Streptococcus agalactiae
ttgtcccacccgaaattagaaagtagtagcaataaagaaatcattaccgaagaggtcggtttactgaagcagcttttggatgaagcaacgcaaaaattgattggtagtgaatcatttgacaagattgaaaaaatagtttcattatcattaactgacgattatactggtctgaaggaaactatttcggctttaagcaacgaggagatggttattgtttctcgttacttctctattttgccgctcttaattaatatttcagaagacgttgatttagcatatgaaattaattataaaaataatcttaaccaagattacctaggaaagttatcaacgactattgatgttgtagctggccatgaaaatgctaaagatattcttgaacacgtcaatgttgtgcctgtgctaacagctcatcctactcaggtgcagcgtaaaacggtgctcgaattaacgtctaagattcatgatttattacgtaaatacagagatgtcaaggcaggaatcgtgaatcaagaaaaatggtatgctgacttgcgtcgttacatcggcattatcatgcaaacagacactattcgcgagaaaaaattgaaagtcaaaaatgagataaccaatgtaatggaatattacaaccgttctcttattaaagcagttaccaaattaacagcagaatataaggcactggcagctaaaaaaggtattcacttggagaatcctaagcctctgactatggggatgtggattggtggtgatagagatggcaatccctttgtaactgctgagacactaagattatcagctatggtacaaagtgaagtgattattaaccattatattgagcagctaaatgaactttatcgtaatatgtcactttcaataaatctaactgaagtctctcccgaacttgttacattggcaaaccagtcacaagataattcggtatatagggaaaatgaaccttaccgtaaagctttcaattttatccaagataaactggtacaaaccctactaaatttaaaagttggttcttccccaaaagagaaatttgttagtcgccaagaatcttctgatattgtaggaaggtatataaaatcacatatcgctcaagtagcttctgacatacagacagaagaactaccagcatacgctactgctgaggagtttaaacaagatttgttacttgtgaagcaatctttagttcaatatggacaagattctcttgttgatggcgaattagcttgtcttattcaagcagtagatatctttggattttatttagctactattgatatgcgtcaagattctagtattaatgaagcttgtgtagcagaattattgaagtctgccaatattgtagatgattacagttctctttcagaagaagaaaaatgtcaacttctcttaaaagaattaacagaagatcctagaacattatcttctacgcatgctcctaaatccgagttacttcaaaaagaattggctattttccaaacagcacgtgagttaaaagatcaattgggtgaagacattataaaccagcatatcatttctcacacagagagcgtttcggatatgtttgagttagctatcatgttaaaagaagttggactaattgatgccaatcaagctcgtattcagattgtaccgttatttgaaaccatcgaagatttggataattcacgtgatattatgacccagtatctacattatgaattagttaaaaaatggattgctactaacaacaattatcaagaaataatgctaggttattcagatagtaataaagatggtggctatttatcatctggttggactctatataaagctcaaaatgagctaacaaaaataggtgaagaaaacggtattaaaatcacatttttccacggtcgtggtggaactgttggtcgtggtggtggtccatcttatgaagctatcacatcacaaccttttggttcaatcaaagatcgaattcgcctaacagagcaaggtgaaatcattgagaataaatatggtaatcaagatgcagcctattataaccttgaaatgcttatttcagcttccatagaccgcatggtaacacgtatgattactaaccctaatgaaattgataatttccgtgagacaatggatggtattgtgtctgaaagtaatgccgtttatagaaatttagtttttgataatccttatttctatgactatttctttgaagcaagtccaattaaagaggtatcaagtttaaatattggttctcggccagcagcacgtaaaacaattacagaaatttcaggtttacgtgcaattccatgggtattttcatggtcacaaaatcgtattatgtttccaggatggtatggtgttggatcagccttcaagcactttattgaacaagatgaggcaaacttagcaaaattacaaaccatgtatcaaaaatggccattctttaattctcttttatctaatgtagatatggttttatcaaaatcaaatatgaatattgcgcttcagtatgctcagttagctggaagtaaagaagttcgagatgtttttaatatcatccttaatgaatggcagttaactaaagatatgattttagctattgaacagcatgataatttattagaagaaaacccaatgttacatgcaagtttagattatcgtttgccatatttcaatgttttgaattatgttcaaattgaattgattaaacgtcttcgtagtaaccaactagatgaagactatgagaagttgattcatattactattaatggtattgcaacaggtttacgaaattcaggt

SEQ ID NO: 10962 - protein, 931 aa, Streptococcus agalactiae
MSHPKLESSSNKEIITEEVGLLKQLLDEATQKLIGSESFDKIEKIVSLSLTDDYTGLKETISALSNEEMVIVSRYFSILPLLINISEDVDLAYEINYKNNLNQDYLGKLSTTIDVVAGHENAKDILEHVNVVPVLTAHPTQVQRKTVLELTSKIHDLLRKYRDVKAGIVNQEKWYADLRRYIGIIMQTDTIREKKLKVKNEITNVMEYYNRSLIKAVTKLTAEYKALAAKKGIHLENPKPLTMGMWIGGDRDGNPFVTAETLRLSAMVQSEVIINHYIEQLNELYRNMSLSINLTEVSPELVTLANQSQDNSVYRENEPYRKAFNFIQDKLVQTLLNLKVGSSPKEKFVSRQESSDIVGRYIKSHIAQVASDIQTEELPAYATAEEFKQDLLLVKQSLVQYGQDSLVDGELACLIQAVDIFGFYLATIDMRQDSSINEACVAELLKSANIVDDYSSLSEEEKCQLLLKELTEDPRTLSSTHAPKSELLQKELAIFQTARELKDQLGEDIINQHIISHTESVSDMFELAIMLKEVGLIDANQARIQIVPLFETIEDLDNSRDIMTQYLHYELVKKWIATNNNYQEIMLGYSDSNKDGGYLSSGWTLYKAQNELTKIGEENGIKITFFHGRGGTVGRGGGPSYEAITSQPFGSIKDRIRLTEQGEIIENKYGNQDAAYYNLEMLISASIDRMVTRMITNPNEIDNFRETMDGIVSESNAVYRNLVFDNPYFYDYFFEASPIKEVSSLNIGSRPAARKTITEISGLRAIPWVFSWSQNRIMFPGWYGVGSAFKHFIEQDEANLAKLQTMYQKWPFFNSLLSNVDMVLSKSNMNIALQYAQLAGSKEVRDVFNIILNEWQLTKDMILAIEQHDNLLEENPMLHASLDYRLPYFNVLNYVQIELIKRLRSNQLDEDYEKLIHITINGIATGLRNSG

SEQ ID NO: 10963 - DNA, 2553 bp, Streptococcus agalactiae
gtggctattgtttctaatagcttagagctaggtcttgccatttggatggttaatgtgattaatggtatttttagtttcattcaggaataccgtgcaagccaagcaacacaagctctcgagaaaatgttaccatcttattcacgtgttcttagaaaaggctcagaagaaaagatattatcagagcaactagtcccaggcgatattgttcttattgaagaaggagaccgtatttcagcagatggtcgcttgattaaaacaacagatttgcaagtaaaccaatcagccttgacaggggaatcaaatcctatttataaagatagcaatgttgaaaacgaccagtctaaaacattgattgaatgtgataatatggttttcgcaggaacgacggtctccagtggtagcgcaacaatggttgttacggcaattggaatgcaaactcaatttggtcaaatcgctgatttaacacaagggatgaaatcagaaaaaagccctcttcaaagagaacttgatcggttgaccaaacagatttctatcatttcaattacggtaggaattatctttttcttagcagcgactttttttgttaaggagccagtgtcaaaatcatttatctttgccttggggatgatcgttgcatttatcccagaaggtttactacctaccgttacactttctctagctatggcagtccaacgaatggctaaagaacacgcacttgtcaaaaaactttcttcagttgagactcttggagcaacctcagttatctgttctgataagactggtacattaacgcaaaatgaaatgaccgtcaatcatttgtggcaaaatggaaagagttaccaagtgacaggactgggttatgctccagaaggacagattctttttgaaggtgacaatatttgctttggtaatagtgatagaggagacttagaaaaacttattcgttttgctcatctctgtagcaacgctcaagtattaccaccaaatgatgatcgttcaacttatactgtacttggagatccgacagaagcttgtttgaatgttttattggaaaaatcagggataaacatacaagaaaatcgtaagtttgcaccacgtttgaaagaattaccttttgattcggttagaaaacgcatgacaactattcatagcttaggaggcgatgaaaaggataaaaaaatttcaattacaaaaggtgcgccgaaagaaatacttgatttatcagattatgtcttatctgatggcaaagttatccccttaaacaaggaagaacgtaataaaatacagttggctaacgatacatttgctaaagatggacttcgcgtcttagctgtttcatactgcgatattgaaggcttttcaaaagaacaatggacgcaagaaaatttggaacaacacatggtgtttatagggttgatagcaatgagtgatccacctcgtgaaggcgttcgcgaagctattgataaatgtcatgcagcaagcattcgtattattatggtgactggagattacggattaacggcactaagtatcgctaaaaatattggtattattcgtaacgatgatgctaaagtaatttcaggtttagagttatcagaaatgacggatagccaattgaaaaaagaattgtcaggtgaagtcgtttttgctcgtgtagcaccagaacaaaaatatcgagtagtaacgatattacaggagatgggtgaagtagtagcagttacaggagacggggtcaatgatgcgcctgcgctaaaaaaatccgatattggtgtagccatgggtgttaccggtactgatgttgctaaagaatcagctgatatgattctgacagatgatcattttgcttctattgtacatgctgtggaagaaggacgggctgtttatcaaaacattaagaaattcttgacgtatatttttaatagtaatactcctgaggctgttccgtcggcattcttccttttttctaaaggttttattcctttaccattgactgtaatgcaaatacttgctgttgatttgggaaccgatatgcttcccgctttaggtctgggcgtggaaccaccagaaacagacgttatgaatcgtcctccaagacggctaacagatcgcttattggacaaagggctacttataaaatctttcctttggtacggcactattgaatccgtattagctatgggtggttttttctgggctcattacttacgttatggtaattttacttttttcgtcgcaaacggcataccgtacagagaagcgacaactatgacacttggagctattatctttagccagataggtatggttatgaatagcagaacgagctatcaatctattaaagcactatctatttttggtaataaattaattaattttggtataataatggagattttagcatttttagtcttagtatacgtgccactattccataacttattcaacacagcaagcctaggtttatcacattggctctatttaataagctgcccatttatcatgataggtttagatgaagttcggaaattattcagcagtagaaagaataaacgg

SEQ ID NO: 10964 - protein, 851 aa, Streptococcus agalactiae
MAIVSNSLELGLAIWMVNVINGIFSFIQEYRASQATQALEKMLPSYSRVLRKGSEEKILSEQLVPGDIVLIEEGDRISADGRLIKTTDLQVNQSALTGESNPIYKDSNVENDQSKTLIECDNMVFAGTTVSSGSATMVVTAIGMQTQFGQIADLTQGMKSEKSPLQRELDRLTKQISIISITVGIIFFLAATFFVKEPVSKSFIFALGMIVAFIPEGLLPTVTLSLAMAVQRMAKEHALVKKLSSVETLGATSVICSDKTGTLTQNEMTVNHLWQNGKSYQVTGLGYAPEGQILFEGDNICFGNSDRGDLEKLIRFAHLCSNAQVLPPNDDRSTYTVLGDPTEACLNVLLEKSGINIQENRKFAPRLKELPFDSVRKRMTTIHSLGGDEKDKKISITKGAPKEILDLSDYVLSDGKVIPLNKEERNKIQLANDTFAKDGLRVLAVSYCDIEGFSKEQWTQENLEQHMVFIGLIAMSDPPREGVREAIDKCHAASIRIIMVTGDYGLTALSIAKNIGIIRNDDAKVISGLELSEMTDSQLKKELSGEVVFARVAPEQKYRVVTILQEMGEVVAVTGDGVNDAPALKKSDIGVAMGVTGTDVAKESADMILTDDHFASIVHAVEEGRAVYQNIKKFLTYIFNSNTPEAVPSAFFLFSKGFIPLPLTVMQILAVDLGTDMLPALGLGVEPPETDVMNRPPRRLTDRLLDKGLLIKSFLWYGTIESVLAMGGFFWAHYLRYGNFTFFVANGIPYREATTMTLGAIIFSQIGMVMNSRTSYQSIKALSIFGNKLINFGIIMEILAFLVLVYVPLFHNLFNTASLGLSHWLYLISCPFIMIGLDEVRKLFSSRKNKR

SEQ ID NO: 10965 - DNA, 4650 bp, Streptococcus agalactiae
ttgggaaccctattttttttaggtggtatcacaaatgtagctgctgattctgtcataaataagccatctgatattgcagttgaacagcaagtaaaagacagtccaacgagcatagcaaatgagacacctactaacaacacgtcatcagcccttgcgtcgacagctcaagacaatcttgttacaaaggctaataatagtccaacagaaacacaaccagtagctgagtctcactctcaagccaccgagacattttccccagtcgcaaatcaaccggttgaaagcactcaagaagtttctaaaactcctttaaccaaacaaaatttagcagtcaaatctacaccagctatttctaaagaaacccctcaaaacattgatagtaataaaattatcactgtccccaaagtatggaacacaggctacaaaggagagggaactgttgtagcaattattgactcaggactagatatcaatcacgatgctctccaattaaatgattcgacaaaagcaaaataccaaaacgaacagcaaatgaatgctgctaaagcaaaagctggtataaactatggaaaatggtataacaacaaagtaatctttggtcacaactatgttgatgtcaatacagagctaaaagaggtgaaaagcacttctcatggtatgcacgtaaccagtatcgcaacagctaatcctagcaagaaagatacaaatgaattaatctatggtgttgctcctgaagcacaagtaatgtttatgagagtcttctctgatgaaaaaagaggaactggaccagccctttatgttaaagctattgaagatgccgttaaactcggtgctgacagcattaatttaagtttaggtggagctaatgggtctttagttaatgccgatgaccgacttataaaagctttagagatggctagactcgctggcgtttctgttgttatagcagcaggtaacgacggtacatttgggagtggagcatcaaagccttctgctctttatcctgattatggtttagttggtagtccatcaacagctcgtgaggccatttctgtagcatcatataataatacaacactggttaataaagtcttcaacattatcggattagaaaacaacagaaatctcaacaacggattagctgcttatgcagatcctaaagttagtgataagacctttgaagtagggaaacaatatgattatgttttcgtaggaaaaggaaacgacaatgattataaggacaaaactttaaatggtaaaatcgccttaattgaacgtggagatattacttttacaaaaaaagtcgtcaatgctattaatcacggtgctgtgggagctattatctttaataacaaagctggggaagctaatctaacaatgagtttagatcctgaagcaagtgctattcctgctatttttacccaaaaagagtttggagatgttttagctaaaaacaactataaaattgtatttaacaatatcaaaaataaacaagccaaccctaatgcaggtgtcctatctgacttttcaagctgggggttaacagcagacggacaattaaaacctgacttatctgctcctggaggctctatttacgccgctatcaatgataatgaatatgatatgatgagtgggacaagtatggcttctccccatgtcgctggtgctactgctctagttaaacaatacttattgaaagaacatccagaacttaaaaaaggtgacattgaaagaactgtcaaataccttcttatgagtactgctaaagcacacctaaacaaagatacaggcgcttacacctcaccacgccaacaaggagcaggtattatcgatgtcgcagcagcagttcagacaggattatacctaactggtggggaaaacaactatggcagcgttacattaggaaatattaaagataaaatttcctttgatgttactgttcataatatcaataaagttgcaaaagatttacactatacaacctatttaaatactgatcaagttaaagatggctttgtcacattggctcctcaacaacttggtacatttacagggaaaacgatacggattgaaccagggcaaacccaaacgattacaattgatatagatgtttcgaaataccatgacatgttaaaaaaagtaatgccaaacggctatttcctagaaggctacgtacgttttacagaccctgttgatggtggggaagttcttagtattccttatgttggatttaagggagaattccaaaacttagaagttttagaaaaatccatttataagcttgttgctaacaaagaaaagggattttatttccaaccaaaacaaacaaacgaagttcctggttcagaagattatactgccttaatgactacaagttcagagcctatctactcaacagacggtactagtcctatccaattgaaagccttgggaagctataagtctatagatggaaaatggatcttacaactagatcaaaaaggccagcctcatctagccatttcacctaatgatgaccaaaatcaagatgccgttgcagtgaaaggtgttttcttacgtaatttcaataatttaagagccaaagtctatcgtgcagatgatgttaatttacaaaaaccactatgggtaagtgctccccaagcaggagataaaaattactacagcggaaatactgaaaatccaaaatctacatttttatatgacacagaatggaaaggaaccactactgatggtattcctttagaagatggaaaatacaaatacgttttaacttattactctgatgtccctggctctaagccacaacaaatggtgtttgatatcactttggatagacaagctcctacactaacaacagcaacttatgacaaagatagacgtatcttcaaagctcgtcctgcagtagaacacggggaatctggtatctttagagaacaagttttttacttaaaaaaagataaagatggtcattataatagcgtcttacgtcaacaaggagaagacggtatccttgttgaagataacaaagtatttatcaaacaagaaaaggatggtagctttattctacctaaagaggttaacgatttctctcatgtctactatactgttgaagattatgcaggcaatctagtatcagcaaaactcgaagatttgatcaatattggcaataaaaatggtttagtaaacgtcaaagtgtttagccctgagcttaacagtaatgtcgatattgatttctcttactctgtcaaagatgacaaaggtaatatcatcaaaaagcaacatcacgggaaagacctcaatttattgaaattgccttttggtacctatacgtttgatctattcttatacgatgaggaacgagcaaatctaatcagtcccaaaagtgtcactgtaactatttctgaaaaagatagccttaaagacgtcttatttaaagttaacttactcaagaaagcagccttactcgttgaatttgacaagcttttaccaaaaggagcaacagtccagttggttactaagacaaatactgttgttgatctaccaaaagcaacttattctcctactgactatggtaaaaacatacctgtaggagactatcgtttaaacgtaacgctgcctagtgggtatagcactttagagaacttagatgatttacttgtatccgtaaaagaagatcaggtaaacctaacaaaattgacgctgattaataaagctcctctgattaatgccctagcagaacaaactgatattattacccagcctgtgttttataatgctggaactcacttaaaaaataattacctagctaatcttgaaaaggcacaaactttaattaaaaatagagtggaacaaacaagtattgataatgctattgctgctttgagagaaagtcgccaagctcttaacggtaaagaaacagatacttctttactggcaaaagctattttagctgaaacagaaatcaagggaaactatcaatttgttaatgctagtccattaagccaatcaacttatatcaatcaagtccaattggcgaaaaaccttctacaaaaacctaacgtcactcaatcagaagtagacaaagccttagaaaatcttgatattgctaaaaatcaattaaatggtcatgaaactgattactctggtttacaccatatgataattaaagcaaacgttctgaaacaaacatcatctaaatatcagaacgccagtcaatttgctaaagaaaattataataaccttatcaagaaagcagaattgctgctttccaatagacaagctacacaagctcaagttgaagagttattaaaccaaataaaagcaaccgaacaagagcttgatggccgtgatagagtttcttccgcagagaattatagtcaatcactcaatgataatgactctctcaataccacacctatcaatccgccaaatcagccccaggcgttgatattcaaaaaaggcatgactaaagaaagtgaggttgctcagaagcgtgtcttaggggtgactagccaaaccgataatcaaaaggtaaagacaaacaagcttcctaaaacaggcgaaagcactcctaaaataacctatacaatattgctatttagtctctctatgctaggtctggcaacaatcaaactaaagtctatcaaaagagaa

SEQ ID NO: 10966 - protein, 1550 aa, Streptococcus agalactiae
MGTLFFLGGITNVAADSVINKPSDIAVEQQVKDSPTSIANETPTNNTSSALASTAQDNLVTKANNSPTETQPVAESHSQATETFSPVANQPVESTQEVSKTPLTKQNLAVKSTPAISKETPQNIDSNKIITVPKVWNTGYKGEGTVVAIIDSGLDINHDALQLNDSTKAKYQNEQQMNAAKAKAGINYGKWYNNKVIFGHNYVDVNTELKEVKSTSHGMHVTSIATANPSKKDTNELIYGVAPEAQVMFMRVFSDEKRGTGPALYVKAIEDAVKLGADSINLSLGGANGSLVNADDRLIKALEMARLAGVSVVIAAGNDGTFGSGASKPSALYPDYGLVGSPSTAREAISVASYNNTTLVNKVFNIIGLENNRNLNNGLAAYADPKVSDKTFEVGKQYDYVFVGKGNDNDYKDKTLNGKIALIERGDITFTKKVVNAINHGAVGAIIFNNKAGEANLTMSLDPEASAIPAIFTQKEFGDVLAKNNYKIVFNNIKNKQANPNAGVLSDFSSWGLTADGQLKPDLSAPGGSIYAAINDNEYDMMSGTSMASPHVAGATALVKQYLLKEHPELKKGDIERTVKYLLMSTAKAHLNKDTGAYTSPRQQGAGIIDVAAAVQTGLYLTGGENNYGSVTLGNIKDKISFDVTVHNINKVAKDLHYTTYLNTDQVKDGFVTLAPQQLGTFTGKTIRIEPGQTQTITIDIDVSKYHDMLKKVMPNGYFLEGYVRFTDPVDGGEVLSIPYVGFKGEFQNLEVLEKSIYKLVANKEKGFYFQPKQTNEVPGSEDYTALMTTSSEPIYSTDGTSPIQLKALGSYKSIDGKWILQLDQKGQPHLAISPNDDQNQDAVAVKGVFLRNFNNLRAKVYRADDVNLQKPLWVSAPQAGDKNYYSGNTENPKSTFLYDTEWKGTTTDGIPLEDGKYKYVLTYYSDVPGSKPQQMVFDITLDRQAPTLTTATYDKDRRIFKARPAVEHGESGIFREQVFYLKKDKDGHYNSVLRQQGEDGILVEDNKVFIKQEKDGSFILPKEVNDFSHVYYTVEDYAGNLVSAKLEDLINIGNKNGLVNVKVFSPELNSNVDIDFSYSVKDDKGNIIKKQHHGKDLNLLKLPFGTYTFDLFLYDEERANLISPKSVTVTISEKDSLKDVLFKVNLLKKAALLVEFDKLLPKGATVQLVTKTNTVVDLPKATYSPTDYGKNIPVGDYRLNVTLPSGYSTLENLDDLLVSVKEDQVNLTKLTLINKAPLINALAEQTDIITQPVFYNAGTHLKNNYLANLEKAQTLIKNRVEQTSIDNAIAALRESRQALNGKETDTSLLAKAILAETEIKGNYQFVNASPLSQSTYINQVQLAKNLLQKPNVTQSEVDKALENLDIAKNQLNGHETDYSGLHHMIIKANVLKQTSSKYQNASQFAKENYNNLIKKAELLLSNRQATQAQVEELLNQIKATEQELDGRDRVSSAENYSQSLNDNDSLNTTPINPPNQPQALIFKKGMTKESEVAQKRVLGVTSQTDNQKVKTNKLPKTGESTPKITYTILLFSLSMLGLATIKLKSIKRE

SEQ ID NO: 10967 - DNA, 2160266 bp, Streptococcus agalactiae
gttcatttagaaatagttgatttcaaatataaatgtaacaatgacgtaatataatttcgtgaattttttggtaaaatatttaatgtcttatcgtaaaggagtagtttaataaaaatgaaaaaaagaatattatcagcagtccttgtgagtggagtaactcttggaactgctgccgtaacagtaaacgctgatgactttgactcgaaaattgctgctactgattcagtaatcaatactttatcagggcaacaagcagcagcacaaaaccaggtgactgctattaaaggacaagttggtgctttagagtctcaacaatcagaattagaagcgcaaaatgctcaacttgaggctgtatctcagcagttaggtcaagagattcaaactctttctaataaaattgttgcacgtaacgaatctttgaaaaagcaagttcgtagtgctcaaaagggtaacttgactaactatattaatactattttaaattcgaaatcagtatctgatgctgttaatcgtgttgttgctattcgtgaggttgtttcagctaatgaaaagatgttagcacaacaagaggctgacaaagcggccttagaagctaaacaaattgaaaatcaaaatgctataaatactgtagcagctaacaagcaagctatcgaaaataataaagcagccttagcaacacaaagagcacaattagaagcagctcaattagagttatctgctcaattgactacagtccaaaatgaaaaagcatctttaattcaggcaaaagcacaagctgaggaagctgcgcgtaaggcagctgaagcacaagcagcagctgaagcgaaagcacaagctgaagcgaaagcacaagctgagtctgtagcaaaagcacaggcagcagcacaagttgagtctgccacagctcctactgaaacagttcaaacacaaccgagaactgaaataaagccttctaatcttacggctacttcttcggcaactactgttgctacaactacagctacagctactaatgagccaaaagttactcaaccttctgtagtaactaaagcagttgaagcacctaaagcagttgtttcttcaacacctagagcggtatcaaaacctgttgtcagaagttatgattcaagtaacacatacccaatgggacaatgtacttggggagctaagtcaatggcttcttgggttggtaactattggggaaatgctaatcagtggggtgctagtgcacgtgcagctggttattctgtaggaactacccctcgtgttggtgcagtagctgtttggccatatgatggtggtggttacgggcacgttgcagtagtaacgtcagtggctaacaattcatctatccaagttatggaatcaaactatgctggaaatatgagtattggcaattaccgtggttcatttaaccctagtgcttctggctctgtttactatatttacccaaattaatgaatactaaggagatctttcgtggtctcctttttgtttattaattaggtatggtttattttggattgaaaaattgtgtaaaaagcgttaaaatggtataggactaaagttttggaggaaatcatgtcttattctaatttaaaattgtttgcactgtcatcaaacaaagaactagcgaaaaaagtgtctcagacgattggaattccgctaggtcaatcgacagttcgccaattttctgatggtgagattcaagttaatattgaagagtctattcgtggccatcatgtttttattttacaatcaacaagctcaccagttaatgataatttgatggaaattttaattatggttgacgctttaaagcgtgctagtgcggagtctgttagtgtggtaatgccttactatgggtatgctcgtcaagatcgcaaggcacgttctcgtgaacctattacttcgaaactcgttgcgaacatgctagaagttgctggtgttgatcgtcttttaacagttgatttacatgcagctcaaattcagggattctttgatattcccgttgatcaccttatgggggctccccttattgcagattactttgatcgtcagggattggttggtgatgatgttgttgtcgttagtcctgatcatggtggcgtaacacgtgcacgtaagctggcacagtgtttaaagacaccgattgctatcattgataagcgccgtagtgttactaaaatgaatacatctgaagtaatgaatattattggtaatatcaaaggtaaaaaatgtattttaattgatgatatgattgatactgcaggtactatttgccatgctgcagacgctttagctgaagcaggggcaacagcggtttatgcttcatgtactcaccctgttttatcagggccggctttggataatattcaaaattcagctattgaaaaattaattgtgttagatacgatttacctccctgaagaacgtttgattgataagattgaacaaatttcaattgcggaattgattggtgaagctattatccgtattcacgagaaacgtcctttatcaccattatttgaaatgaataaactaaaatgacaaaaaacctgttattaacaggttttttatcatttaatgacggaaaactggacacaaattatttttcttgtataattaaatatattatttcttatcaggaggttatgatgacattagagaaacgatttaataagtacttagatagaatagaggtctccttaattcgtcagtttgatcaatctatttcagatatacctggaatggtaaaattaactcttggagaaccagattttaccactcctgatcatgttaaagaagcagctaaatcagctattgatgcgaatcaatcgtattacactggtatgagcggtttattagctctaaggcaagctgctgcagattttgcaaaggataaatataatcttacttataatcctgattgtgagatcttggttacgataggtgccacagaagctctgtctgcatctcttatagctattttagaagctggtgatgttgttctattacctgcccccgcttatccaggatatgagccaatagttaaccttgtaggagctgatatcgtagaaattgatactagagaaaatgactttagactaactcctgaaatgttagaaacggctattatccaacaaggtgaaaaattaaaggctgttttacttaattatcctactaaccctacaggtattacctattcaaggcaagaaattgctgcattagctgaagtccttaaaaaatatgatatttttgttattagtgatgaagtttattctgagttaacttacactggtcagcagcatgtttcaattgcagaatatttacctaaccaaactatcttaattaatggcttatcaaaatcacatgctatgactggttggagagttggattggtgtatgctcctgaagcatttattgctcaaatcattaaaagtcatcaatacatggtgacagctgctagtactatttcgcaatttgctggggtagaagccttatctgtgggtaaaaatgatacgttacctatgcgtcaaggatatattaaacgtagagattatatcattgataaaatgtctaaacttggtttcaaaataattaaaccgagtggcgctttttatatctttgctaaaatacctgatagctatccacaggattctttcaagttttgtcaggattttgcttatcaacaagctgtagctattattccaggagtggcttttggtaaatatggtgaaggatatatacgtctttcttatgctgctagtatggaagttattgaaacagcaatggctagattgaaagtttttatggaatcatatgagggttagtcaaacatacggtctcgttttgtataatcgtaattatcgtgaagatgataaattagttaaaatctttacggagactgaggggaaaaggatgttttttgtaaagcatgcttcaaagtcaaaattcaatgctgtgctccaacctttgactattgctcattttattttaaaaattaatgataatggtctttcttatattgatgattataaagaagttttagcatttcaagaaaccaattcagacttgtttaagttgtcatatgcgagttatattacttctttggctgatgtggctattagtgataatgtagcggatgctcaattatttattttcctaaagaaaacgttagaattgattgaggacggtttagattatgagattctaacgaatatttttgaagtacaactactagagaggttcggtgttgctttaaattttcatgattgtgttttttgtcatagggtaggattaccttttgatttttcacacaaatattctggattattatgtccaaaccattattataaagacgagagaagaaaccacctagatcctaatatgctgtacttaatcaatcgttttcagtcaattcaatttgatgatttacaaacaatttctgtgaaacctgagatgaaacttaaaattcgtcaatttttggacatgatttacgatgaatatgtagggattcatcttaaaagtaaaaaatttattgatgatttgtctagttggggaagtattatgaaatcagattaagttgtaaagaggaacatgacattagtgtcatgttcttttttttaatattaggataaactaatatggaattaatttttaggatatttgagatgaaaaaaacattatacattaccaataaactcttttttgctaactggtttgtgccagttattggtgcagttctaattcaagttatcggcatcattgtaagtagacgccttgtagtaaaattgctacctgatgattataaattcaatttatacattgcgcttttactatttgttcctattttggcaagtattttactatttttaatctattttcaaaaaagggattttacttccttgggatttactaaagataataatgttttaacaacgatctcaggatttattactggtagtttactgatgttttttatttatatttgccactggttatcaggttttgtggaaatttcttccagcaattccttttcttttggaccttttttctttttatttcttgcatactttatccaaagcttgacagaggaaattttatttagaggatatgttatgacaacagttaccaaatttaaaggtagttttgcaggtgttttatgtaattctatgttgttttcttttatccactttagaaactatggtatcacagcaatagcactttttaatttatttttacttggtattattttttctattctttttaatatgaccaaaaatattctttttgttacaggagttcatactacatggaattttactatgggatgtgtattaggtaataaggttagtgggggggattctcctgtttctctttttagaattactgaaaattctagctttgctctttggaatggtggggattttggttttgaagggggagtactatgttctttgatattagtaggttgtttagcatacttttctttggaaagcgtgagagtatctgttagatattagctattattgccttcttgtgaaaaaaataaagaaacgtgctataatatagccactaagtttttatgaggagttcattcatgaagaaaattgctatagatgctatgggtggagattacgctcccaaagctattgtagagggtgttaatcaagctatttcagattttagtgatattgaagtacaactctatggcgatcagaaaaaaattgagaaatatttaacagtaacggagcgagttagtattattcatactgaagaaaaaattaattctgatgatgagcctgctaaagctgttcgtcgtaaaaaacagtcttcgatggtcttaggagctaaggcagtcaaagatggtgttgcacaggcctttatttctgcagggaatacaggagctttattagctgctggtttgtttgtagtaggacgtataaaaggtgttgatcgaccaggcttaatgtcaactatgcctacgttagatggtgtgggttttgatatgcttgatttaggagctaatgcagaaaacacagcttctcatcttcatcaatatgctattttagggtcgttttatgcaaaaaatgtccgtggtattgaagttcctcgtgtaggtctcttaaataacggaacggaagaaacaaaaggcgattctcttcataaagaagcttatgaactgttagcagcagagccttctattaattttattggaaatattgaagcacgtgatttgatgtctagtgtagcagatgttgttgtcactgatggttttactggaaatgctgttctaaagacaatggaaggtacagctatgagtattatgggaagcctaaaatcttcaattaaatcaggtggcgtgaaagctaaattaggagcacttctattaaaagatagcctatatcagctaaaagatagtatggactattcaagcgcgggtggagcggttctttttggtttaaaagctccaatagtaaaatgccatggatcaagtgattctaaagctgtttattctactttgaagcaagttcgtacaatgttggaaactcaagtagttgatcaattagttgatgcctttacagatgaataggagtgaactcatgtcaagagatgaagtttttgaaaagatgctggaattattaaggcagcaacttggtgacccacagttagatatcacaccagagtcatcgttacatgatgatttagcaattgactctatcgctttaacagagtttattatcaatttggaagatgtgtttcatctagagattccagatgaggctgtcgaacacatgtcaagcgtccaacaactattagattatatcattgaacataagtaataataaaaaggaagaaaatacgaacgtttcttcttttttttgattttaaataaagtttttgttgtattagataatgttgtgtgttagaataactcttaaaataagagaaaggcgaataatcaagtgactaaccagcttatttatacaggaaaagcgaaagatatttatagtacaaaagatgaaaatgtgattagaacggtctataaagaccaagctactatgttgaatggagctcgtaaggagactattgatggcaagggagcactaaataatcagatttcatctcttatttttgagaaattaaatatggctggtgtggtgacacattatattgagcaaatttcaaaaaacgaacaattgaataaaaaagttgatattattccacttgaggtggtgctacggaatgtgacagcaggctcattttcaaaacgttttggagtggaagaaggacacgttcttgaaacgccaatcgtggaattttactacaaaaatgataatctgaatgatccttttatcaatgatgagcatgtgaagtttttgggtattgttaatgatgaggagattgcttatctgaaaggagagactcgccatattaatgaactcttgaaagattggtttgctcagattgggcttaacttgattgacttcaagttggagttcggatttgacaaggatggcaaaatcatcttggctgatgagttctcacctgacaactgccgtctctgggatgctgatggtaatcatatggacaaggatgtttttcgtagggatcttggtagcttgaccgatgtctatcaagttgtacttgagaagttgatagcattgtaattagaagaggaaggaattgaatccgttcgggaaactcagaaaaaagattgggcttactgaaatctcaatttcagacgtcctcctattttcgagtcgctcccttgtcggacttggtatcttatatgaataaacgtatttttgttgagaaaaaggctgactttggcattaaatcggctagtcttgtgaaagagttgacgcataatctacaactggcttctttgaaggatttgcgtatcgtgcaggtctatgatgtcttcaatttggctgaggatttgctggcgcgtgctgagaagcatattttctctgagcaggtgacagaccgtcttttgacagaagctgaaatcactgcggagcttgataaggttgccttctttgccattgaggcgcttcctggtcaatttgaccaacgtgctgctagttcgcaagaagctttgctattgcttggaagtgacagtcaggtcaaggtcaatacagctcagctttacttggtcaataaggatattgcagaagcagagcttgaagccgttaagaactatcttttgaatcccgttgattcacgtttcaaggatattaccttgccacttgaagtgcaggctttctctgtgtctgataagacaatctctaatcttgatttcttcgaaacttatcaggctgacgattttgcagcctataaggcagagcagggattggctatggaggtcgatgaccttctcttcatccaagattatttcaaatcaatcgggcgtgtgccaactgagactgagttgaaagttttggatacgtattggtcagaccactgccgtcacacaacctttgaaactgaattgaaaaacattgatttttcggcctctaaattccaaaaacaattgcaggcgacttatgacaaatacattgccatgcgtgatgagcttggtcgttctgaaaagccgcagacacttatggatatggcgactatctttggtcgttatgagcgtgccaatggtcgtctggacgatatggaagtctcagatgaaatcaatgcctgctcagttgaaattgaagtagatgttgatggtgtgaaagagccttggctcctcatgtttaagaacgagactcacaaccacccaacagaaattgagccatttggtggagcggcgacttgtatcggtggtgccattcgtgacccattgtcaggacgttcatacgtttatcaggctatgcgtatttcaggcgcaggagatatcacgactccgattgcggaaacacgtgctggtaaattgccacaacaggttatttctaagactgcggcgcacggctattcttcatatggtaaccaaattgggcttgcgacaacttatgtgcgtgagtacttccaccctggcttcgtagctaaacgcatggagcttggagctgtggttggtgctgcacctaaggaaaatgtggttcgtgaaaaaccagaggcaggcgatgtggttgtcttgctcggtggtaaaacaggtcgtgacggtgtcggcggtgcgacaggttcatctaaggttcaaacggttgaatctgtggaaacagctggcgcagaggtacaaaaagggaatgccatcgaagaacgtaagattcaacgccttttccgtgatggtaatgtcactcgcctaatcaagaaatcaaatgacttcggtgcaggtggtgtctgtgttgccatcggtgaattagctgatggtcttgaaatcgatttggacaaggtgccacttaaataccaaggtcttaatggtactgaaattgctatctcagaatctcaagaaaggatgtcagttgttgttggtccaagtgatgtggatgccttcatcgcagcctgtaacaaggaaaatatcgatgcagttgttgttgcgacagttactgaaaaaccaaatcttgtcatgacttggaatggtgaaacaattgttgatttggaacgctgtttccttgataccaacggtgttcgtgtcgtagttgatgccaaagtcgttgacaaggacttaacagttccagaagcgcgcacaacatcagcagagacacttgaagcagatatgcttaaggtcttgtctgacctcaatcacgctagtcaaaaaggtcttcaaactatctttgactcatctgttggtcgttcaaccgttaaccacccaatcggtggtcgttaccaaatcacaccgacagaaagttctgttcaaaaattgccagttcaatatggtgtgacaacaacagcatctgttatggctcaaggttacaatccttatattgcagagtggtcaccttatcacggtgctgcctatgctgttattgaagcgacagctcgcttggtagcaacgggtgctgactggtctcgtgcacgtttctcttaccaagagtatttcgagcgtatggataaacaggcagagcgttttggtcagccagtatcagctcttcttggttctattgaggctcagattcaatttggtttgccatcaatcggcggtaaggactctatgtctggtactttcgaagaattgacagtaccaccaaccttggtagctttcggtgtgacaacagcggacagccgcaaggttctctctcctgagtttaaagcggctggtgagaatatctactacattccaggtcaagctatttcagaagatattgattttgaccttatcaaggctaactttagccagtttgaggctattcaagctcaacataagattaccgctgcctcagccgttaaatacggtggtgtcctagaaagtcttgctctcatgacttttggtaaccgtatcggtgcttctgttgaaattgcagagcttgacagcagcttgacagctcaactcggaggctttgtctttacatcagttgaggaaattgctgacgttgtgaagatcggtcaaactcaggcagactttacagtcactgtcaatggaaatgacctagctggtgcaagccttctatcagccttcgaaggtaaattagaagaagtttacccaacagagtttgaacaggtagatgctattgaggaagttcctgctgtggtatcagatgttgttatcaaggctaaggaaattattgaaaaaccagtagtttacatcccagtctttcctggtactaactcagagtacgattcagctaaggcctttgaacaggttggagctagcgtcaacttggtgccatttgtaaccttgaatgaggctgctattgctgagtcagttgatacgatggttgctaatattgctaaggcaaatatcatcttctttgctggaggtttctcagcagcggatgaaccagatggctctgctaagtttatcgtcaatatcttgcttaacgagaaggttcgcgcagctattgacagcttcatcgaaaaaggtggccttatcatcggtatctgtaatggtttccaagcccttgttaaatcaggtcttcttccatacggaaacttcgaggaagctggtgagacaagtccaaccctcttctataacgatgctaaccagcacgttgcaaagatggttgagactcgtatcgcaaataccaattcaccttggttggcaggagttgaggtcggcgatattcatgtcattccagtttcacacggtgaaggtaaatttgttgtcagcgcttctgaatttgcagagctaagagacaatggtcaaatctggagccaatatgtggactttgacggacaaccatctatggattctaaatacaatccaaacggctctgtcaatgccatcgaagggattaccagcaagaatggtcaaatcatcggtaagatggggcactcagaacgctgggaagacggactcttccaaaatatccctggaaacaaagaccaaaaactctttgaaagtgctgtaaaatactttacagggaagtgagagtgggacaaaaatcggtaattccaaaggaattcgattttgtcgtccccctccgcacagttgagtggggctgtaagagttgatttatcagcgaattagagcccactcaacccctacgttttgcgaactagattataaaaaatatggaggcttaggacttttgtcctagctttagccctcgccttgaattagtgaaggcgaggttagatagaaattcgctatcttttgaacgaagcgagcttaaccgtatctttccgccgtattggtatttgggagtcattgagactaaggttcaatggctagcttgatagattttctattttaatgttggcattgatgacgacagatccaaaattgagaaaatcatcaaagctacttaagaagagatacaaaaagaattaggaaaaaagaatgacatacgaagtaaaatctctaaatgaagaatgtggagtctttggtatctgggggtatcctcaggcagctcaagtcacttactttgggcttcatagccttcaacatcgcggtcaagaaggagctggtattatttcaaatgataatgggaaactctatggttatcgaaatgttgggctcctttctgaagtttttaagaatcaatctgaattagataatttaactgggaatgcggctattggacatgttcggtatgctactgcaggttctgcagatattcgcaatattcagccttttctttataaatttcatgatgggcaatttgctttatgtcataatggtaatttgacaaatgctatttcctcaaggaaagaattagaaaagcaaggtgcaattttcaatgcctcctcagatactgaaattttaatgcatttgattcgtcgaagccataacccaagttttatggggaaggtaaaagaagctttaagcactgtaaagggaggtttcgcctatctactgatgacagaagataaattaattgctgctcttgaccctaatgcctttcgtcctttgtcaattggacaaatgcaaaatggtgcctgggttatttccagtgagacctgtgcttttgaggtggtaggcgcaaaatgggttagagatgttgaacctggtgaagttattcttatagacgatagtggtattcaatgtgatcgttatactgatgaaacgcaactggcaatttgttcgatggaatatgtctattttgcaaggccggattcaactatacatggtgttaatgttcatacggctcgaaaaaatatgggaaagcgtcttgcacaagaatttaaacaggatgctgatattgtaattggtgtcccaaattcgtccttatcggctgctatgggctttgctgaagaatccggattaccaaatgagatgggccttgtaaaaaatcagtatacgcagcgaacctttattcaaccgacacaagaattaagggaacaaggtgttcgaatgaaattatcagcggtatctggtgttgtcaaaggaaagcgcgttgttatgattgatgactcaattgtaagaggaacgacttctagaaggattgtaggattattaagagaagcaggagctactgaagtacatgttgctatagctagtccagaattaaagtatccttgtttttatggaattgatattcaaacaagacgagaattaatttcagcaaatcacgctgttgacgaagtgtgtgatattattggcgcagatagtctaacttatctatcaatcgatgggttaattaaatcaattggactcgaaacaaaagcaccaaatggtggtttatgcgtagcttactttgatggacattatccaacaccgctttatgattatgaagaagaatacctcagaagtttagaagaaaaaacaagtttttatattcaaaaagtgaaataagctctgctaattatataaggagaaaacatgtctgaaaaaaatgcttatgcccagtctggtgttgatgtagaagcgggctacgaagttgtcgaacgtatcaagaaacacgttgctcgcacagaacgtgctggtgtcatgggagctctcggtggctttggtggtatgtttgacctgtcacaaacaggtgttaaagaacctgtcttgatttcagggactgacggtgtcggaactaaactcatgcttgctatcaagtacgacaagcacgacacaatcggtcaagactgtgttgccatgtgtgtcaacgatattattgcagcaggtgctgagcccctttacttccttgactatgtcgcgactggtaaaaacgaacctgccaaattggaacaggttgtcgctggtgttgctgaaggttgtgttcaagctagcgcagctcttatcggtggtgaaacggctgagatgcctggtatgtatggcgaagatgattatgaccttgcaggctttgctgttggtgtggctgaaaaatctcaaatcatcgacggttcaaaggtaaaagaaggggatattcttcttggacttgcttcaagtggtatccattcaaatggttattcattggtacgtcgtgtctttgctgactacactggtgatgaggtgcttccagagcttgaaggcaaacaactcaaggatgtccttcttgagccaactcgtatctatgttaaagcagctctgccattgatcaaggaagaactagttaacggtatcgcccacatcacgggtggtggttttatcgagaatgttcctcgtatgtttgcggatgatttggctgcggaaatcgatgaggataaggtgcctgtacttccgattttcaaggcgcttgaaaaatatggtgacatcaagcacgaagaaatgtttgaaatcttcaacatgggtgtcggtcttatgctggatgttaaccctgaaaatgttgaccgtgtcaaagaacttttggacgaaccagtctatgaaatcggtcgtatcatcaagaaagcagacgatagtgtggtgattaaataagtcactaaattttataagaaaggagtgtttagttagtttgcctaactgaacacgggattaaatttctaggaaaaaagataaaacgacttagacgcaagcgtcgttgttcgttttcctatttttctacgaaatttttcggcaagccgaatcatccctttgtatcgaatatgaaaatcgctgtttttgcttctggtaatggttccaactttcaggtcatagcagagcagtttcaagttagttttgtcttttcagatcatcgtgatgcctatgttttagagcgtgctcagaacttagccattccaagcttcgcttttgaactcaaagagtttgagaataaggcggcttacgagcaagccgtcgttgatttgttggacaaacacgagattgacttggtctgtctggcgggctacatgaagattgtcggagaaaccttgctctcagcctatgaagggcgtatcatcaatattcacccaacctatctgcctgaatttccaggtgctcacggtatcaaggatgcttgggaggcaggtgttgaccagtctggtgtgaccatccattgggtggactctggtgtggataccggtcaggtcatccaacaagtgcacgtgccacgcctagcagatgatagtctagaaagctttgaaacccgcatccacgaaaccgaataccaactctacccagctgtcttagatagcttgggcataaagagaaaatagtaaaatttgttataataagctaatgaaactagtgaaaaatttagagatagtagagtctatttttggtgattgggacgagaccataatctggtcgtgtgtccaaggtattatgggagaagtttttgtagatagtttagaccaaccaaaatcttctttggcaaaattgggaaggaaatcatcttttggttttctagcaggtcagcctactttatttctactagaagtttgctctggggaggatattatccttgttcctcagcataaaggatggtcagatttgattgaatcaacttatggtcagaatgctcattcttttaagcgttatgcgacgaaaaaagatactttgtttgagcgaagtaggttagagaagtttgttactcagttgccaaatggttttgaattacgtgctattgatgagaaagtttacaactcttgcttagaaaaggaatggtcacaggatttagtagcaaattacgctacttatcagtactataaaaaacaaggtataggttatgttgtatattatcaggggaatatcattgcaggagcttcatcttattcaacctataaaaatgggattgagatagaagtagatacgcatccagattttcgtcggcgtggtttagcaacaatagttgcagctcagttaatactaacttgtttagataagggaatttatcctagctgggatgctcatacaaggacttcattgaatttatctgaaaaactcggttatgaattttctcatgaatacatagcctatgaaatagattgaagtaagaaaaggagaactcatgactaaacgtgctttaatctcagtttctgacaaatcaggaattattgactttgcaaaagaattgaaaaacttgggttgggatattatctcaactggtgggactaaggttgcccttgatgatgctggtgttgagaccattgccatcgacgatgtgactggattcccagaaatgatggacggtcgtgttaagaccctccacccaaacattcacggtgggcttctggctcgtcgcgacgctgacagccaccttcaggctgctaaggacaacaatattgagttgattgacctcgtggttgtcaacctctatcccttcaaggagaccatccttcgcccagacgtgacctacgatttggcggtggaaaatatcgacatcggcggtccatcaatgcttcgctcagctgctaaaaaccacgctagcgtaaccgttgtggttgattcagctgactatgccactgttttgggagaattggctgacgctagtcagacgacatttaaaactcgtcaacgcttggcagctaaggccttccgtcatacggcagcctacgacgctttgattgctgagtacttcacagctcaagtgggagaggctaagcctgaaaaattgaccatcacttatgaccttaaacaggctatgcgttacggagaaaatccacagcaagacgctgatttctaccaaaaagccttaccaacagactactcaatcgcttcagctaaacagctcaatggaaaagaattgtccttcaataatatccgtgatgctgatgcagcaatccgtattatccgcgatttcaaagacagtccaacggttgttgccctcaaacacatgaacccatgtggtatcggacaggctgatgatattgagacagcttgggattacgcttatgaagctgatccagtttcaatctttggtggaattgttgtccttaaccgtgaagttgacgcagcgacagctgagaagatgcaccctatcttcttggaaatcatcatcgcaccatcatactcagaagaagcgctagctattctcacaaataaaaagaaaaacttgcgtatccttgagttgccgtttgatgcccaagctgccagcgaagtggaagctgagtacactggcgtagttggtggacttttggtgcaaaaccaagacgttgtggctgaaaatccatctgactggcaagtggtgacagaccgccagccaacagaacaagaggcgactgcccttgagtttgcctggaaggctatcaagtatgttaagtctaacgggattattattactaacgatcacatgacgcttggactcggtgcaggtcaaaccaaccgtgtcggctcagtcaagattgctatcgagcaggctaaggaccaccttgacggtgccgttctagcatcagatgccttcttcccatttgcggacaacattgaagaaatcgctgccgcagggatcaaagcaatcatccaaccaggtggttcagttcgtgaccaagaatctattgacgccgcaaacaaacatggcttgaccatgatcttcacaggcgtgagacattttagacattaaaaaatagtagtttaggttttcttaagttaactcaggtatactacgtatatcctaaaaacttttctttttattaaacctcctaagtactcatcaaggtgagtactttttttgatattttgatttaaattttcgaataagttaattgcaagtgtttgagcacttcattatattaattctatttggaggtttttcttgaataaatggttagttaaggcaagttccttagttgttttaggtggtatggttttatctgcgggttcccgagttttagcggatacttatgtccgtccaattgataatggtagaattacaacaggtttcaatggttatcctggacattgtggggtggattatgctgttccgactggaacgattattagggcagtggcagatggtactgtgaaatttgcaggagctggagccaacttttcttggatgacagacttagcaggaaattgtgtcatgattcaacatgcggatggaatgcatagtggttacgctcatatgtcacgtgtggtggctaggactggggaaaaagtcaaacaaggagatatcatcggttacgtaggagcaactggtatggcgacgggacctcaccttcattttgaatttttaccagctaaccctaattttcaaaatggtttccatggacgtatcaatccaacgtcactaattgctaatgttgcgacctttagtggaaaaacgcaagcatcagctccaagcattaagccattacaatcagctcctgtacagaatcaatctagtaaattaaaagtgtatcgagtagatgaattacaaaaggttaatggtgtttggttagtcaaaaataacaccctaacgccgactgggtttgattggaacgataatggtataccagcatcagaaattgatgaggttgatgctaatggtaatttgacagctgaccaggttcttcaaaaaggtggttactttatctttaatcctaaaactcttaagactgtagaaaaacccatccaaggaacagctggtttaacttgggctaagacacgctttgctaatggtagttcagtttggcttcgcgttgacaacagtcaagaactgctttacaaatagtttgaggtattgattcattgttttaaatgacagttgtgttactaactaagtacaatttctttaaaccgtctgaaaataattttatagtccagtaaagtgtgatattatagtctcggactaataaaaaggaaataggaattgaagcaatgaaaatgaataaaaaggtactattgacatcgacaatggcagcttcgctattatcagtcgcaagtgttcaagcacaagaaacagatacgacgtggacagcacgtactgtttcagaggtaaaggctgatttggtaaagcaagacaataaatcatcatatactgtgaaatatggtgatacactaagcgttatttcagaagcaatgtcaattgatatgaatgtcttagcaaaaataaataacattgcagatatcaatcttatttatcctgagacaacactgacagtaacttacgatcagaagagtcatactgccacttcaatgaaaatagaaacaccagcaacaaatgctgctggtcaaacaacagctactgtggatttgaaaaccaatcaagtttctgttgcagaccaaaaagtttctctcaatacaatttcggaaggtatgacaccagaagcagcaacaacgattgtttcgccaatgaagacatattcttctgcgccagctttgaaatcaaaagaagtattagcacaagagcaagctgttagtcaagcagcagctaatgaacaggtatcaccagctcctgtgaagtcgattacttcagaagttccagcagctaaagaggaagttaaaccaactcagacgtcagtcagtcagtcaacaacagtatcaccagcttctgttgccgctgaaacaccagctccagtagctaaagtagcaccggtaagaactgtagcagcccctagagtggcaagtgttaaagtagtcactcctaaagtagaaactggtgcatcaccagagcatgtatcagctccagcagttcctgtgactacgacttcaccagctacagacagtaagttacaagcgactgaagttaagagcgttccggtagcacaaaaagctccaacagcaacaccggtagcacaaccagcttcaacaacaaatgcagtagctgcacatcctgaaaatgcagggctccaacctcatgttgcagcttataaagaaaaagtagcgtcaacttatggagttaatgaattcagtacataccgtgcgggagatccaggtgatcatggtaaaggtttagcagttgactttattgtaggtactaatcaagcacttggtaataaagttgcacagtactctacacaaaatatggcagcaaataacatttcatatgttatctggcaacaaaagttttactcaaatacaaacagtatttatggacctgctaatacttggaatgcaatgccagatcgtggtggcgttactgccaaccactatgaccacgttcacgtatcatttaacaaataatataaaaaaggaagctatttggcttcttttttatatgccttgaatagactttcaaggttcttatataatttttattaaattgaggagattaagctataagtctgaaactactttcacgttaaccgtgactaaatcaaaacgttaaaactaaaatctaagtccgtaaagattattgaaaacgctttaaaaatagatataataaggtttgtagatatctaaaattaaaaaagataaggaagtgagaatatgccacatctaagtaaagaagcttttaaaaagcaaataaaaaatggcattattgtgtcatgtcaagctttgcccggggagcctctttatactgaaagtggaggtgttatgcctcttttagctttggcagctcaagaagcaggagcggttggtataagagccaatagtgtccgcgacattaaggaaattcaagaggttactaatttacctatcatcggcattattaaacgtgaatatcctccacaagaaccatttatcactgctacgatgacagaggtggatcaattagctagtttagatattgcagtaatagccttagattgtacacttagagagcgtcatgatggtttgagtgtagttgagtttattcaaaagataaaaaggaaatatcctgaacagttgttaatggctgatataagtacttttgaagaaggcaaaaatgcttttgaagcaggagttgattttgtgggtacaactctatctggatacacagattacagccgccaagaagaaggaccggatatagaactccttaataagctctgtcaagccggtatagatgtgattgcggaaggtaaaattcatactcctaagcaggctaatgaaattaatcatataggtgttgcaggaattgtagttggtggtgctatcactagaccaaaagaaatagcggagcgtttcatctcaggacttagttaaaagtgttactcaaaaatcaaaatcaaaataaaaaaggggaatagttatgagtatcaaaaaaagtgtgattggtttttgcctcggagctgcagcattatcaatgtttgcttgtgtagacagtagtcaatctgttatggctgccgagaaggataaagtcgaaattacgtggtgggcttttccaacctttactcaagaaaaggctaaggatggagtaggtacttatgagaaaaaagtcatcaaggcttttgaaaagaaaaatcctaatataaaagtaaaactagagacaattgatttcacatctggacctgaaaaaatcactacagcgattgaagcagggacagcacctgatgtgctttttgatgcaccagggcgaattattcaatatggtaaaaatggtaaattagcagatttgaatgatttatttacagaccaatttattaaggatgtcaataataagaatatcattcaagcttctaagtctggcgataaagcctacatgtatccaataagttctgccccattttatatggcgttcaataaaaaaatgcttaaagatgcaggagttttgaaactcgtaaaagaaggttggactactagtgattttgaaaaagtactaaaagcactaaaaaataaaggctatacaccaggttcattctttgcaaacgggcaaggaggagatcaaggaccacgtgcattttttgctaatctttatagtgctccaataacagataaagaagtaacaaaatataccactgacactaaaaattctgtaaaatcaatgaaaaaaatagttgaatggattaagaaaggctacttgatgaatgggtctcagtatgatggctcagctgacattcaaaactttgccaatggacaaactgctttcactatcctatgggctccagctcaacccaaaactcaagcaaaattattagagtcaagtaaagtggattaccttgaagtgccattcccatcagaagatggaaaaccagatttagaataccttgttaatggttttgcggtctttaataataaagatgaaaacaaagtaaaagcctctaagaaatttatcacttttattgctgacgataaaaaatggggaccaaaagatgttatacgtacaggtgctttcccagttagaacatcatttggagatctttataaaggtgataaacgtatgatgaagatttcaaaatggactcaatattattcaccatattacaacactatcgatggattttctgaaatgagaaccttatggttcccaatggttcaatctgtatccaatggtgacgaaaaaccagcagatgctttgaaagactttactcaaaaagcaaatgataccattaaaaaagcagctaaataattaaggagactccttttctatggtcaatcacatattgggatagaagaggagtttttagtcaagttaagatgtaaaggagagtaccgtatgcgtactaataagttaaagatgagggaaacgatgatagcttatgcttttctagcacctattctcttatttttcttaatttttgtttttgcaccgatggttatgggctttgtcactagtttttttaattattctatgacacagttcacttttattgggttagctaattacaatcgtatgtttcatgattctattttcatgaaatccttgataaatacagtaatcattgtgattggctctgtgccagtagtggttttcttctcactttttgttgctgccaatacttatgaaaaaaatgttttttcacgctctttctaccgttgtgtcttcttcttgccagtagtaactggtagtgttgcagttacagttgtttggaaatggatttatgaccctatgtccggaattttaaattacatcttgaaatcaggtcatgtcattgaacagaatattagctggcttggggataagcactgggcattgcttgctattattattattttgctaacgacctcagttggtcaacctattattctatatattgcggcgatgggaaatattgataattctctttgcgaagctgcgcgtgttgatggagccaatgaaatgcaagttttttggcaaattaaatggccgagtctcttaccaactacactctatattgcagttataacaacaattaattcatttcaatgttttgccttaatccagctcctaacatctggtggaccaaattattcaacaagcactttgatgtattatctttatgaaaaagcctttaaactatcagaatatggctatgctaatactatgggagtattcctagcagtaatgattgctttaataagttttgctcaatttaagatcttaggaaatgatgtggaatattaggaggaaaacatgaaaaagaaaacattcagtgcttataactttttaacggctcttatcctttgtcttttgacagtgctttttatctttccattttattggattatgacaggagcttttaaatctcaacctgatactattatcatccccccacaatggtggcccaaagcaccgaccttagaaaattttaaagctttaactgtacaaaacccagctttgagatggctttggaatagtgtctttatctcaattatgacaatgttcctagtttgctgtacatcgtcaatggcaggctatgttttagctaagaaacgattttacggtcaaaaaatattgttctccctttttattgctgctatggctttacctaaacaagttgttttagtgccattagttagaattatcaattttatggggatacatgataccttatgggcggttattttacctcttgttggttggccttttggggtcttcttgatgaaacagttttctgaaaatattccaacagaattactggaatcagctaaaattgatggttgtggagagattcgaacatttattaatgtagcatttccaattgtcaaacctggatttgctgccctagctattttcacatttatcaatacttggaatgactattttatgcaattagttatgctaacttctagaaataatctgaccatttctcttggggtagctactatgcaggctgaaatggcaacaaactatggcttaattatggcaggtgcagccttagctgctgttcctattgtgacagtattcttagttttccaaaaatcctttactcaggggattacaatgggagctgttaaaggataggtaggatttattatgatttacgatcatttattgaatttaacgcattataaagatattaatcctaatttagatttagcgattgattatctactaagtcatgatttaaggaatttagatataggcacctatcatattagcccagaagtgatactcatggtccaatcaaatcaacttagtgagtcatttgatcatatttttgaataccataaaaaataccttgatatacattatgtcattgaaggacatgaagttatcaaattgggaaaaggtgataaggtagaggtggaggaatacttaggcgatataggatttatcaagtgctcagaagagacttcttttgatttgagagataattatatagccttctttttcccagaagaagctcatcagccaaatggtatgggaagtctaggtaattatgtcaaaaaaggggtattgaaagtgttaatggcgtaagaaatacagggagtatattgtgaaaaaagcaaatcaattaatagcagcgatttttgatgttaacaacccctttatgcaaggttgcaatgttgtttttgatctggcattactaaaccttctctttatgataacttgcctaccattggtaactattggtgctgctaaaattagtttgtatcgaacgttgtggcaaaaattagaaggtgatcagacaaatcttttaatattgtatataaaacacctaaaaaaagagtggttccaaggtatgcttttaggtttggttgaactaagtattttggttgtgatcatatttgatttaacaattcttcattatcaaataggtttcattgtgtctttcttgaagataacttgttacgcctttttgttattgactgtgatgacgagcatatacctatttcctatggctgcccgctacgaaatgtctcttttagataccgtgaaaaagagctttataatggcatgtttaaacttgaaatggactggtgtattgatgtttttattaatcatgacttggtttattatggtgcagtctagtctcttatttatgcttacagtgtcagctatatttatttttgcttataccgcctttgcttactttaaaattattattttacaaaaacaatttgcctatttcagcaaacaacaaggagattatcaatgaaagatttacaaaaatatcaaggaattattcctgcattttatgcttgctatgatgataagggtgatatttgtcccgaacgagtaaaagccctgaccaattattttattgataaaggtgttcaaggactttatgttaatggttcatccggagaatgtatttaccaaagtgtagcagatcgtaaacttgtactggaaaatgttatgtccgttgctaagggtaaactaacagtaatagcgcatgtggcatgtaataatactaaggatagcgtagagttggctatgcatgctgaagctataggtgttgatgctattgcagcaattccaccaatttattttcgattaccagagtatgccatagcagattattggaatactattagtcaagcagcaccacaaactgattttattatttacaatattcctcaattggcaggggttgctttgacatcggatttatatcgaaaaatgttacaaaatccgcaagtaattggtgttaaaaattcttccatgccagttcaagacattcagaattttgtggctattggaggagaaaatcatattgtttttaatggtccagatgaacaatttttgggtggtcgtctcatgggagccgctgcaggtattggtggtacctatggcgtaatgccagaattatacttgactttaaatcagttaattgttgataaagatttagaaaaagcgcgtgaacttcaatttacaattaacgatattatcacaaagctttgttcgggtcatggtaatatgtatgctgtgatcaaagctgtattggaaatcaatgagcaactaactataggttccgttcggttacctttagcatctgtaacagaagaagataaacctattattaaagaggcagcagaaatgattagacatgctaaaaaacagttttgttaaagtgaggtagataattatgaccagaacagtagcaattgatattggcggtacaatgattaagcatggcattgtggataatttaggttgtattgttgaggcaagtgagcttgccacagaagcctacaaaggtggtccaggcattttacaaaaagtttgtcaaattatcgataactatctagcagaagggagcattgatggaattgctatctcatctgctggcatggtagatccagatgaaggatgtatattttactctggtcctcaaattccaaactatgctgggacacaatttaagaaagttttagaagacacttatcaagtacgcacagaaattgaaaatgatgttaattgtgcaggattagctgaagctgtctcaggtagtgccaaagatagttcaatagcgctttgtcttactattggaacaggtattggtggttgtctgattattgataaaacagtttttcatggctttagtaattctgcttgtgaagttggctatatgcacctttcagatggtgattttcaagatttagcctctacaactgcactgattgctgatgttgccaaagcgcatggagatgaaattagccgatgggatggacgtcgtatttttcaggaggctaaaaaaggcaatgaaaaatgtattgcaagtatagaccgtatgataaactaccttggccaaggaatcgctaatatggtttatgtggtaaatcctgaaaaagttgttttaggtggtggaatcatggctcaaaaagattatttacaagataaacttagtgaatctttgaaacgaaatcttgtgacaagtcttgctgaaaaaacagcaatagtctttgcacaacacgaaaaccaagctggtatgctaggagcttactaccattttaaaaacagggggtgacgggtatatgattgaaacaatgtcgctagatgacatgagagaatacctaggtcaagaccaaattcccgaggattttgatgacttctggaaaaaacaaacaatgaaatatcaagggaatattgagtatcgtctagacaaaaaagatttcaatattacttttgcacaagcttatgatcttcattttaaaggcagcaataactctattgtctatgccaaatgtttattccctaaaacaaataaaccctatcctgtagttttttattttcatggttaccaaaaccaaagtcctgactggagtgaccaacttaattatgtagcagcaggttacggcgttgtttcaatggatgttcgaggtcaagctggacagtctcaagacaaggggcattttgatggcattacagttaagggccagattgtgcgaggaatgatctcaggaccaaatcatcttttttataaagacatttatcttgatgttttccaattgattgatatcattgctacattagagagtgttgatagtaatcaactttatagttatggctggtctcaaggtggagcacttgctttgatagctgcagctcttaatcccaaaatcgtcaagaccgttgctgtttacccatttttgtcagactttagacgagtattagatttagggggtgtcagtgagccctatgatgaactcttccgctattttaaatatagtgatccttttcataaaacagagaataatgtgttaaaaactttggcttatattgatgttaaaaattttgcacataggatttcttgccccgttgttttactaacagccttaaaagatgatatttgtcctccatcaactcaatttgccatttttaatcgtctgacatcaactaaaaagcatcttttattaccagattatggacatgatccaatgacagtgcaagtaaaagaccatatttttgatcaactgacaggaagtcaatttacaaagcaaaaaatcgagtagattatttctactcgattttcatttagcgttgaataatggtttctctaaaaattcgctctttttctattttattaatatctaaaaattgtgcatagataatatctaccatgattaacattgggatctgaggcgaaattctattgccgtagtctaaatgcctagcagaagccacctgaataatcttgtcaaaagcatagtcaattgtgtgaggttgttttgtaaatagaacggttttagctccgtgacaacttgcgatttttaaggcaccaataacagagttggtgttcccagaaagtgagaaggcaatgacgaggcatctatcattaacaatactattagtccatgagaaactatctgtatcatccagagcctcacaaatcactcccagcctcataaggcgtattttaaattctttagctactagcgatgagctccctttgccataaaaataaacacgatcagcttgctcaatcatatgtgatacttctagaagctgttcttcatcaataatatcagcagatttagaaatcatctcttgataattcataaatactttcttagtgttgtcattttgaagaccgtataattgttgactgatggtctcatggctttttaaatattcaaaaacaaattcacgatagcctttaaacccacattttttagcaaaacgcgttaaggctgcttgtgaaatgtgtagttgcttagtgacaatggtagaagcaagagcgtcttttgaaatgggctgccccataaaataacaagcaatttcacgttctaaatcagtcattaaatcaagagcagactcaatttggtcataaatagtcataatacacggtcctctcctctttaagaaagcgcttaatatattcagtataacataaagttagtgagggaccaaactaagttctaagaaacagcaatgataagttttaaatagcaatatgaaggatcaataacataatatatgttaagtatatattatgatataaatttttcaaaaaagctgtaataaaaaaaataaaagcgaacaaatgtgttataattttataaatgatacgtttttattgaaaatttctttttatattatttaataggagttattctgatatgaaattgcttgttgttggttctggtggtcgtgagcatgcgattgctaagaagttgttagcgtctaaggatgtggatcaggtttttgtggcacctggtaatgatggtatgaccttggatggtctagacttggtaaatatcggaatttccgaacattctagactgattgactttgttaaggagaatgagattgcttggacccttattggtcctgatgatgcgctagcagctggtatcgttgatggttttaatagtgctggactcagagcatttggtccaaccaaggcagccgcggagctagagtggtcaaaagactttgccaaggaaatcatggtcaaatacaatgttccaacagcagcctatggcacattttcagattttgaaaaagctaaagcctacatcgaagagcagggcgcaccaatcgtggtcaaggctgacggattggcgttaggcaagggcgtggtcgtggctgaaaccgttgagcaggcggtagaggcggcgcaagagatgcttttggacaacaagtttggcgactcgggtgcgcgcgtggttatcgaggaattcttggatggtgaagagttctcccttttcgccttcgctaatggcgataagttctacatcatgccgacagctcaggatcacaagcgtgcctatgatggtgacaaggggctaaataccggtggtatgggtgcctatgcgccagttccccacctgcctcagagcgtggtggatacagcagttgagactatcgttaagcctgtccttgaaggcatgattgccgaagggcgtccttatctaggtgtcctctatgctgggcttatcctgacggctgatggccctaaggttatcgagttcaactcacgttttggtgaccctgaaactcagattatcctccctcgcctgacttccgatttcgctcagaacatcgacgacatcatgatgggcatcgagccttacatcacttggcagaaggacggcgtgactctgggcgttgtcgttgcctcagaaggctatccgctcgattacgagaaaggtgtgccactgcctgaaaagaccgacggcgacatcatcacctactatgcgggagctaagtttgcggaaaatagcaaagcactgctctcaaacggaggacgtgtctacatgcttgtcaccacagaagacagcgtcaaagcagggcaggacaaaatctatacccaactcgcccaacaagacacaacaggcctcttctaccgaaacgacatcggaagcaaagctattaaggaataagactactcattcaaatattagcgtcagcaaagcgaccgaaggtcgctccaaaaagaaagaagaaaggaactgaacacgggactaattttctagtgaaaaagataaatcttcctagatgctaaagcatcttcgtcagatttctgcgtcgtaggcgtctgctgctaaagcacctagtcgccctgacgtgggtacgtcttcgaaatcaaagatttcggacttaccgcatatttttctacgaaaattttcgacaagtcgaaacgtccctttgtatcttaatattatgcaaccaattatttctattatcatgggttccaaatccgactggacaaccatgcaaaaaacggctgaagttctagataactttggcattgcttacgagaagaaagtcgtctctgcccaccgtacgccagacctcatgttcaagcatgctgaggaggcgcgtggtcgtggtatcaagattatcatcgctggagcaggtggagcagcccacttgccgggtatggtagcagctaaaacaaccctgcctgttatcggtgtgcctgtcaaatcacgtgccctctcaggtttggattcgctctactctattgtgcagatgcctggtggtgtgcctgtggcgaccatggctatcggagaagcaggagcgactaacgctgccctgacagccctccgtatcctctctatcgaggatcaaaatctggctgatgcgctagctcatttccatgaggaacaaggaaaaatcgcagaggagtcaagcaatgaactcatttaagaccattgggattattggtggtggtcagctggggcagatgatggcgattgcggctatctacatgggccacaaggtcattacgctggatccagctagcgactgccctgcctcccgcgttagcgaggtgattgtggcaccttacgatgatgttgaggctttgggaacattagctgcgcgttgcgatgttttgacctatgagtttgagaatgtcgatgccgatggtctggatgccgttgtgtcagctggtcagctaccgcaggggactgatctgctccgcatttctcaaaaccgtatctttgaaaaagactttctggcaaataaggctggcgtgactgtcgctccctataaggtggtgacatctagccttgacctagaggggcttgacttgaccaagacctatgtcctcaagacagcgacaggtggttatgacggtcatgggcaaaaggttatccgctcagcagaagacctgccagaggcgcagcaattagccaactcagctcagtgtgtcttggaagagtttgtcaacttcgaccttgaaatatcagtcatcgtgtctggaaatggtcaggatgtgacggtctttcccgttcaggaaaatatccaccgcaacaatatcctgtcaaaaaccatcgtaccagctcgcatctcagaccaactagctgacaaggctaaggaaatggctgtgcagattgccaagaaactccagctatcaggaaccctctgtgtggaaatgtttgcgaccgcagatgacatcatcgtcaatgaaattgccccacgtccccacaactcagggcactactctatcgaagcctgcgacttttcacagtttgacacccacatcttgggcgtactgggcgcaccgcttccgccaatcaaactccatgctccagccgttatgttcaatgtcctaggacaacatgtccagcaggcaattgaccatgttgcccaaaaccctagcgcccacctccacatgtatggtaaactagaagcaaaacataaccgcaaaatgggacacgtgacggtgtttagcgatgtacctgatgaggtggaagagtttgaagaaaggatggatttctaaggaggtttatggaattttaggggggagaatgattttgaagggagtgttgtcagatgaatagaataataaacagggatattttacctagaatttcaaagatttctaaaaataataaagagaaagatttactatctatagcttatattacttggctaatctttataatatttgctttgggagtagttacagttaatgatttaaaaccgatgtttaatcaattaatagtaaacctcttaaatatttattattatatggaagccttcatattgggtatggacagctatttacaatataaccttccatacagttttgatttttggagtatttttgtagaggctataaatttatttgtaaaagtatttttaattgcttttattccttctgttattagaaaagtattgaaaaaagaaagttttttcaatgaagttgttattttactaggagcgattgttactataattgtaagtttccatttatatttagagatattgatagtagtgggactaatacttttattaattgcttttgtttcaataggtaagaatcgtgtttataattttgttcaaaatttaaactactttgaagaagtgatttggaattattttgaagaaaatccggttaaaataaaagaaaaatcattgattattaaatttttacttactatttcttttgtttttgtaattgattttgcaatggttagattgttgaattttaatataaaattttctacaatattagcttgttctgctattttattagcatggttataccaaaataagtctgttacagaacccttcctattaaaaaagttagttatctattttatttttttcattgccactttaattggtaatttaaaaaatgagttgtcaatcttagaaacaccattactttttattagtatattttttactatggatagaattattgctctatctaaagaaatgcgtgatttgattatatctaagagtattttattttattatgatcatgaaaatataaagccatcaatattacttagtgagataaaagaaattaagtatcttgaaaatgtagatattggagaacttgaacttgttaggcaaatggtaattaggttgcgtctagagttagaggaagaatttttgattttatcagatatatatatgaaaaatggctatgaaaaatatatacaatttgttcaaggaaatgtttattttatcaacttagaattggataaaattcccaactacactaacttgaaattaatactagaatcaatatttgatcataataatcaaaagatatttatacctaaactttatgaggaatacatatacatcttaatttctttaggagaagttgaaaaagctaaagaaatattaaaagaagtgtcggattatttaactgaagaatctttgaattattttgaaaaagaatatgataaagctaagggtagtaattagaattttttaaaggagtaaaacaaaatgatcgaacgttattcacgccctgagatggcggcaatttggacagaggaaaataaataccgtgcttggttggaggtcgagattttggctgacgaggcatgggctgagttgggtgagattcctaaggaggatgtggctaagattcgtgagaaggcggattttgacattgaccgcattcttgagattgagcaggacacgcgtcacgatgtggtggctttcactcgtgcggtttctgagacgcttggtgaggagcgcaagtgggtgcactacggtttgacgtcgactgacgtggtggacactgcctacggttacctctacaagcaggctaacgatattatccgtcgtgaccttgagaatttcacaaatattgtggctgataaggctaaggagcacaagttcaccatcatgatgggtcgtacccacggtgttcacgctgagccaacgactttcggtcttaagttggcgacctggtacagcgagatgaaacgtaatattgagcgttttgaacatgctgccgcaggtgtggaagctggtaagatttcaggtgccgttggtaactttgctaacattcctccatttgtggaacaatatgtttgtgacaaattgggcatccgtccgcaagagatttcaacacaggttcttccacgtgacctccacgcagaatattttgcagtgcttgcaagcattgcaacttctatcgaacgtatggcgacagagattcgtggtctgcaaaaatcagaacaacgtgaagttgaagaattctttgccaaaggtcagaaaggtagctctgctatgcctcacaaacgcaacccaatcggttcagagaacatgactgggctagcgcgcgtgattcgtggtcacatggtgacggcttatgagaacgtggcactttggcacgagcgtgatatttcgcactcatctgctgagcgtatcatcacacctgacacaacgatcttgattgactacatgctcaaccgttttggcaatatcgttaagaacttgactgtcttcccggaaaatatgatgcgcaatatggaatcaacttttggtttgatttatagtcaacgtgttatgctcaaattgattgaaaaaggaatgacacgagaagaagcttatgacttagttcaacctaagacagcttattcctgggacaatcaagtggatttcaaaccacttttagaagaagacaccaaagttacctcttgtcttacacaggaagaaattgatgaactatttaatccgatttattacacaaaacgtgttgatgatatttttgaaagactaggattagaaaaataagaaaattccattactggttaacgtttttttaaccagtaatggaatttttattgatttaaaaggaattaatattaaaaaacatacttaaaatgagtttattatgataatatataataagaagaaaaatttaggagttagtttttaaaggaaaatgttaaaacattttggtagtaaagtaagaaatttgagagtaactagaaatattactcgcgaagatttttgtggtgatgaaactgagttatctgtaagacaattagctaggattgaaagtggacagtcaattccaaacttgactaaagctcactacatagctaaacaattgaatgtaaaattggatattttaacaggaggagagagcttagaattacctaaacggtataaagagttgaagtatttgattttaagaattccaacttatgcagatgctgaacgattaaaattaagagaatgtcagtttgatcatattttcgaagaattctatgataatcttccagaagacgagtgcttagcaattgacagtttacaagctaaatttgaagtctatcaaacaggagacattaattttggtgtggaggttttatgcgaatgctttgataaagtaaaatataaagaaaaatatactcttaatgatttgattatcatagatttgtttttaacttgtgcagttgtatctaaatttaacaatagagcatttactaaagaagtatttcaaactatatgtaaaactttgataagtcagaaccacaaacttacagcagaagatttgttttggtttaatcatgtactcctgaattgtgtatttgttggactttgtttaaatagtgaagagtgtcttgcagaaatgttagaagttagccgacaaacgatggtgtcaacacatgattttcataaaatgcctttatattttatgtaccaatggaaatacttcattacaattgacaatgatataaagtctgcagaaaatgcttaccaacaatcaattatgttttcaaaaatgattgatgacaagcatctaattaaaaaattagaattggagtggcaagaagatataacaggacattgatgtcctgtgactctgaggtctaaaaatttataataaacgtacaaaatattatttaggagtttattatagtgattaaaaaatgttttttaatagtattacttgttctattatcaaatttaggttcatttgatttgtttttaggaatgggttggtggaatatgggctaagtaagctgttctgtgatttcttgaggttggattaactataagatcagtttattcttcctttaaataagggagatactaatacaccaacttagttcttaacttttcctatacaaatgttataataatatcatgacaagatttttagatagtgatgcaatgggtgacgaagaattggtagaacgtacacttcgtccgcagtatttaagagagtatattggacaagataaggttaaagatcagctaaaaatatttattgaagctgctaaattgcgtgatgagtcattggatcatgtgttattatttggccctcctggtttagggaaaacaaccatggcatttgtaattgctaatgagttgggtgtcaatctcaaacaaacatcaggtcccgcaattgaaaaatcaggggatttagtagccattttaaatgatttagaaccaggtgatgttctttttattgatgaaattcatcgtatgccgatggcggttgaagaggtactttatagtgcaatggaagacttctatattgacattatgatcggtgcaggagaaactagtagaagtgttcatctagatttgccgccctttaccttaattggtgcaacgacacgtgcaggtatgttatctaatcccttacgtgctcgctttggtattacagggcatatggagtattatgaagaaaatgatttgacagaaattattgagcgtacagcagacatttttgaaatgaaaattacttatgaagctgcttctgaattagcgcgtcgcagtcgtggaacgccacgtatcgctaaccgtttattgaaacgtgttcgagattatgctcaaatcatgggagatggtttgatagatgacaatattacagataaagcattaacgatgttagatgttgatcacgaggggcttgattacgtcgatcaaaaaatcttaagaaccatgattgaaatgtataatggaggtcctgttggtttaggaactctatccgttaatattgctgaagaacgagatactgttgaagacatgtacgaaccttatttaattcaaaaaggttttattatgcgtacccgtaccggtcgtgtagctacggttaaggcatatgaacatttaggttatcagcgatttgataaataaaacataagtcattttaaggctagagtatctagtcttaattttttaattttcatgcaatgttaagtattagatatgttgtagttattctttgagcagttaaacgtattataagtaccttttttctgttataatagaccaaaaggagtttgctatgaagaaagtctgttttgtttgtcttggaaatatctgccgtagcccgatggctgagtttgttatggcgaatttagataaggaggatagcctcttggttgagagtcgtgcgacttcaacatgggagcatggaaatcctatacataggggaacgcaagcgattttgcagcgttatcaaattccttacattaacgataaagggtcacaacctatttctaaagacgatttagcatattttgattatatcatcggtatggatgagcaaaatgtcaaggatttaaaagctctatcacaaggaacctatgatgataagattagtcttttttgtgatggtggtgttcctgatccatggtatactggtgattttgaggaaacctatcgtctagtcaatgatggctgtaaacagtggttaacgctaataaataatagtagagattaagtagaaatgaagaattttaaaataacacgaactcatctagaaatattatctttgataattattgttgtttttggtttatcagtatttaccttaacgacttctagtcaaggagtctttagctatgatggcggcaagataaaatatgtgggctctattgttaatcaccatatgactggtaaaggtaaattaacctatgagaatggggattactataagggcgattttgtaaatggagtctttgaagggaaaggaacatttgtttcagttcatggctggtcttatacaggtgactttaaaaaaggtcaacctgatggacaaggtcgcctcaatgctaaaaataagaaagtctataaggggacatttaaacaggggatttatcaaaaatgagaataaaatggttttctttggtacgtataacaggactactacttgttttactttaccatttctttaagaatagttttccaggaggatttgttggcgttgacatcttctttacattttctggttttctgattacggccttattgattgatgaattttctaaaacgaaaaaaattgattttgttagtttttgtcgtagacgtttttaccgtattttcccaccattagtattgatggttttggtgacaataccttttgtatttctggttaaaagcgattttagagcaagtattggctctcaaattatgactgctttaggttttaccagcaacttttacgaaatcttgactggtggtaactacgaaagtcaatttatccctcacttatttgtgcatacctggagtctttctattgaagtccatttttatgttttatggggcttaacggtatggctcttatcgaaaagatcaaaagatcaaaagcaattgagggggactttgttccttatttccatgggaatttttggagtcagcttccttaccatgtttgttagagcctttttcgttgataatttttcaacgatatatttctctacattatcacatatatttccgttctttttaggagcgatggtggctacaatatctggtattcgagagattaccggacgattcaagaaaaatatcaaaaatctgactttgaagcataatttaatcatgatgggtagtgcttttgctggtctaatgattttaacttttgcacttgattttgataatcggctaacatatctttttggttttgtattgtctagcatttttgctagtgtaatgatttacaatgcacgtattttacacgagcatacaccagatatttcagaaccttttgtgattacttatcttgctgatatcagttacggtatgtacctttttcattggccattttatattatttttagtcgtttatccccaaactggatagctgttattttgacagtagtattatcagcagtcttctcaacattatcattttatatcattgaaccttttattttaggtagaaaacctaaattccttgattatgaatttgacttgttgccttacaaaaagtggttatttagtatcggaggggtactaactcttattactgtagtgacaatgttgacagctccaagtataggtagttttgagacagaattattgcagaattcgttacaacaagctagaacaaatactaaccgaacacatacactagccgcaggggatgcaggtgctcttagtgatgtgacagtaatcggagattcagttgccttaaggtcaagtgctgcttttaataaattgttaccagaagtacaattagatgctgcggtgagtcgtaattttagtaaatcatttgatatttttgaaaaccgtattcaaaataaagccttgtccaaaattgttgttttggcagttggtgtgaattcattagataactacaagacagacttgagccaatttattaaatctttgcctaagggacaccgtttgattatagtaacaccttataatgctaaaaatatgagtcaagttacgacagtgcgtgattatgaactctcgctaatgaaaaaatataattacataacggttgctgactggtataaggttgcgacagaacatccagaaatctggggaaatacagatggtgtgcattatagtgatagcgatactacaggggctgatttatatgttagtaacgtcaaaaaagctattcaaaaatcagctcaacgagctgcaaaataaacaagtccgagtcatgtactcggctttttttgtgaaaacgaataatagatatctccgtttatggtgataaaaatgaaatcgataggctttaatctgaaaattagtaatgaaaaaacaaatataattaaagcgctttcaagaaatatttccgaaagattgaaaaaaagttcacaaaaaagttgtgaaactatttacaaagtttttaaatatgctataataatctcgtaaacaaatttgtgaaacatttaacaaatcaaaaggagtctcaaatgactgaaaaaactaaagcagtagaaactacagatgttgctcttgcaattgatacattggttcaaaatggtttaaaagcacttgatgagatgcgtcaacttaatcaagaacaagttgattatattgtagctaaagcttctgttgcagccttggatgcccatggagaacttgctcttcatgcagtagaagaaactggtcgtggtgtctttgaagataaagcgacaaaaaatttatttgcatgtgaacacgtcgttaacaacatgcgtcatacaaagacagtgggagttattgaagaagacgatgtcacaggcttgacattaattgctgaaccagtgggagttgtctgtggtatcacgccaacaaccaacccaacttcaactgctattttcaagtcattaatctctcttaaaacacgtaatccaattatttttgccttccacccatcagcacaagaatcatcagcacatgcagcacgtattgttcgtgatgctgctattgctgctggagctcctgaaaattgtgtccaatggattgaacaaccatcaattgatgcaactaatgctttgatgaaccatgatggtattgccactatccttgcgacaggtggtaatgcgatggttaaagctgcctactcatgtgggaaacctgcccttggtgtaggtgctgggaatgttccagcttatgttgaaaaatcagctaatatccgacaagccgctcacgatattgttatgtctaaatcatttgataacggtatggtatgtgcatcagaacaggctgttattattgataaagaaatttataaagaatttgttgaagaatttaaatcttatcatacctatttcgttaataagaaagaaaaagctcttcttgaagaattctgttttggtgcaaaagcaaatagcaaaaactgtgctggtgcaaaattaaatccaaatattgttggaaaatcagcagtttggattgctgaacaagctggatttactgttccagaaggaacaaatattcttgccgcagaatgtactgaagttagtgaaaaagaacctttgacacgtgaaaaactatcacctgttattgcagtattgaaagctgaatctacagaagatggtgttgaaaaagctcgtcaaatggttgagtttaatggtctagggcactcagctgctattcatacaaaagatgcagacttagctcgtgaatttggaactagaattcgtgctatccgtgttatttggaattctccttctacttttggtggtattggggatgtttacaatgctttcttgccatcattgactcttggttgtggttcgtatggacgtaactcagttggtgataacgttagtgctataaatctcttgaatatcaaaaaagtaggaagacgtagaaataatatgcaatggtttaaagtcccttcaaaaacatacttcgaacgtgattctattcaatatttgcaaaaatgtcgcgatgttgaacgtgtcatgattgttacagatcacgccatggttgagcttggtttcttggatcgtatcattgaacaacttgatcttcgtcgcaataaagttgtttatcagatttttgctgaagtagaaccagatccagacattacaacagtaatgaaaggaacagatttgatgcgtaccttcaaaccagacactattattgcattaggtggtggttctcctatggatgctgcgaaagttatgtggctcttctatgaacaaccagaagttgatttccatgacctcgttcaaaaattcatggatatccgtaaacgtgcgttcaaattcccagaacttggtaagaaaacaaaatttgttgctattccaacaacttctggaacaggttctgaagtgacaccatttgccgttatctctgacaaagcaaataatcgtaaatatccaatcgctgattattcattaacaccaactgtagctatcgttgatccggcccttgttatgactgttcctggttttattgcggctgatacgggtatggatgtattgacacatgcaacagaggcttatgtttcacagatggcaaatgattatacagacggacttgctcttcaagcaattaaaattgtgtttgactacttagaacgctcagtaaaagatgctgattttgaagcacgtgaaaagatgcacaatgcgtcaactatggcaggtatggctttcgccaatgcattcttaggtatttctcactcaatggcgcataaaattggcgcacaattccataccgtacacggacgtacaaatgcaattcttttgccgtatgttatccgctataatggaactcgtccagctaaaacagcaacatggcctaagtacaattactatcgtgctgacgaaaagtatcaagatatcgctaaattactcggcttaccagcagcaacaccagaagaagctgtcgaatcatatgcaaaagctgtgtatgaccttggaacacgtttaggtattaagatgaatttccgcgaccaaggcattgatgaaaaagaatggaaagaaaaatctcgtgaactagctttcttagcatatgaagatcaatgttcaccagcaaatccacgccttccgatggtagatcacatgcaagaaatcatcgaagatgcttattatggttatgaggaacgtccaggacgtcgtaagtaacagcagtcgaagaatctcactctattgagtgggatttttagtttcaaaaagattaaccggttaagaatattttcaaaaaattttctgaaaatcacttgacatagtttgtgaagaataatacaatataaaatgtaaacgattacaaaataagatatatttatttctaggaggttttatcatgaaagcggttgttgttaatcaagctagtacaggtgttgaagttgttgagcatgatcttccaaaagttggtcatggtgaagcacttgtaaaagtagaatactgtggtgtatgccatactgatttacacgttgcacatggagatttcggccaggtaccaggacgcattttgggtcacgaaggcattggtatagtagaagaaattggagaaggcgtaacgtctttgagggttggtgatcgtgtctctattgcatggttctttgaagggtgcggtcattgcgaatactgtactacaggacgtgagacactttgtcgtagtgttaaaaatgctggatacagtgttgatggtggtatgagtgaatacgctattgttaccgcggactatgcggttaaggttcctgagggattagacccagctcaagcatcatcaatcacttgtgctggagtaacaacatacaaggctatcaaagaagctggagctgctcctggtcagtggattgcagtgtatggtgcaggtggtcttggaaacttagcagtccaatatgcaaaaaaagtattcaatgctcatgttgtagctgttgatattaacgcagataaacttcaattagctaaagaggttggagcagatttgacagttaatggcaaagaaataaaagatgttgcggcatatattcaagaaaagacaggcggttgtcatggagtggttgtgactgctgtttctaaagttgcgtttaatcaggcgattgacagcgttcgtgctggaggtacagtggtagctgtcggtcttccatcagaatatatggaattgagtattgtaaaaacagtacttgatgggattcgtgtggttggttccttagttggaactcgtaaagacttagaagaagccttcgcatttggagcagaaggcttggtagtaccggtggttgaaaaagtgcctgtggatacagctcctcaagtattcgatgaaatggaaagaggattgattcaaggacgtaaagttcttgactttacaaagtgataatgatgttacgaaccccctttattttaataaagggggttaattatataacgaacaatggacatgttattaaattgtgttacaataactaaaagatatttatataaagagggattcttatggcaatagtatatcaatcaacacgtgatgctagtaataaagtgacagctagtcaagcgattctaaagggattagctgacgatggaggactctttacccccatcacatttccaaaagttgatttagatttcactaaacttaaggatgcttcctaccaagaagtggctaaactcgttttgtcagctttttttgatgattttactgaacaagaattggattactgtattagtcaagcttatgatactaaatttgatacaactgaaatagccccgatagtaaagattggagaccggtatcaccttgaattatttcacggtcctacaattgcatttaaagatatggctttatccattcttccttatttgctaacaacagcagccaaaaaacaaggggttgataataaaatcgttattttaacagcaacatcaggtgacactggcaaggcagcgatggcaggttttgcagatgttccaggaactgagattattgtcttttatcctaaaaatggtgttagttatatccaagaattgcagatgataacacaagccggacaaaatactcatgttgttgcgattgaaggaaattttgatgatgcacagacttcagttaaagaaatgttcaataattcccttcttcgattaaaattatcacagcagcatatgcagttatcatcagccaattcaatgaacatcggtcgccttgttcctcaaattgtttactatatatatgcatatgctcaattagttaagtcaaaggaaatctcaattggtcaaccaattaattttagtgtacctacaggaaattttggtaatattttagcagcatattatgctagtcaaattggattacctgttaccaaactcatttgtgcctcaaatgataataacgttctaacagatttttttaagacacaaacctacgataaaaatcgagaatttaaagtgacatcaagtccctctatggatattttggtctcctctaatctagaacgattaatctttcaccttttaggcgatgatgcagaaacgactaaaaaattaatggaagatttagtgactactggggagtatgccttagaggctaggcaagcaaatattttagagagctttgtagcgggatttgcgacagaacaatttgttgaattagacatcaaacatttatttgaccagtatcagtatatagaggatccgcatacagctgtagcatcagctgtttatcaagcttatcagacagaaactaaagatcaaactccagcagtaattgtgtcaacagcaagtccttataagttcccgtgtgttgttacaaaggctattacaaataaagaagagatacaggatttcgctgctatttcaatcttaaacgatttgtcaggtgtttctttacctaaggcggttacagatctacaaaaggccgaagtaatccatagaacggtagtacctacctcaaatatgcgagaaacggttgaagagtgtctaggtttgaaacaataataaaaatacgattgttttaaaatatttagagcgagaaagaaacattttagaaattttcccatcactctctttttaatgatcctgggtaatagaaaggagatactgtgcgttatagtaaagagattattcagttagctataccagctatgattgaaaatatcttacaaatgctcatgggagtagttgataattatctagtggctcagttaggtgttgtagcagtatcaggtgtttcagttgctaataatataattactatttatcaagctatttttatagctttaggggcgagtatagcaagtctattggccaagtcgttagcaggtagtaagaaggatgatgcaatttcagtatgttctcaagccatttttctaacattactgataggggcagtattaggaattatctcgattgtttttggacaaactttctttaaacttttagggacaacaaaaagtgtcgcacaagttggtggtttatatttagcaattgtgggtggaggtgttgttactttaggaatgttaaccaccctaggctcatttttacgtgtgcaagggcaacctcgtttaccaatgtatgtcagtatttttgtcaatttcctcaatgcagtcttatcaggttttgctatttttgagtggcgctatggtttggtcggagtggcagtatcaactcttatcgcaagattaattggtatttgtatccttgcgaagtatcttcctattaaaaagataataaaaagaatgacttggaaaatcagtgcacaaatttggaatcttgccttaccatcagcaggagaacgtctgatgatgcgagctggagatgttgttatagttgctattgttgttcagttaggtacaaatgttgtagcgggaaatgctattggagaaaccttgacacaatttaattatatgccaggacttggcatcgcaactgctacaattatcctaactgcaaaatatgtaggacaaaaaaacagagaatctatagaagaaactattcaaagttcgtattatattggcttagttctaatgatccttatatcaagttttatgcttcttgcaggcaaaccattgacacagttatttacaaataatccttctgccattaaaggaagtttgattgttattttgctatctttcgtaggagtacctgctactattgggaccttggtttatacagcagcttggcaaggattaggaaatgctaaactcccattttacacaacgactataggcatgtggttaatcagagtagttcttggttatttattaggaatagtttttgaattaggtttgcttggggtttggatggctacgatagcagacaatatctttaggtggctgtttttgaaagttcactatcatcgatatattcaaaaaatgtaaccagaaatggttgcatttttttcgaaaataataaaataatgcttgcgtgtgctgtttttttttgatatcatatactggtgctgtgtatgaacagctttagctatgatgcaagaggttgcgacacgctaggttgcattgccacgcgactcgtgttggttttcttgaggagctagcctattatcgtaaatagacgagaggagaaaagatggcaaacaaaaaaatccgtatccgtttgaaagcgtacgaacaccgtacacttgatacagcggcagaaaaaatcgttgaaactgcaacacgtacaggtgctacagttgctggaccagttccgcttccaactgaacgcagtctttacacaattattcgtgcgactcacaaatataaagattctcgcgaacagtttgaaatgcgtacacacaaacgtttggtagacatcatcaacccaacacaaaaaactgttgatgctttgatgaaacttgatcttccaagtggtgtcaacgtagaaatcaaactttaatttgatttctgagcacaaaaaacgctcgtaaaaaacttttttgagcacaaaaaacgctcataaaaaactttttgaaataaaataagaaaaggaaatattttctcatgacaaaaggaatcttagggaaaaaagtgggaatgactcaaatcttcactgaatcaggcgaattcatccctgttactgtcattgaagcaactccaaacgttgtgcttcaagttaaaactgttgaaacagacggttacgaagcagttcaggttggttttgatgacaaacgtgaagtattgagtaacaaacctgccaaaggccatgttgcaaaagcaaacacagctcctaagcgcttcattcgtgaattcaaaaacattgaaggcttagaagttggtgcagaattatctgtagaacaatttgaagctggtgatgttgttgacgtcacagggacatcaaaaggtaaaggtttccaaggtgttatcaaacgccatggtcaatcacgtggtcctatggctcacggttctcgttaccatcgtcgtccaggttctatgggacctgttgcgcctaaccgcgttttcaaaaacaaacgcttggcaggacgtatgggtggtaaccgtgtaacagttcaaaaccttgaaattgtacaagttatcccagagaaaaacgttgtcctcatcaaaggtaacgtaccaggtgctaagaaatctcttatcactatcaaatcagcagttaaagctgctaaataataagaaaggagaaaacagttaaaatggcaaacgttaaactatttgaccaaactggtaaagaagttagctcagttgagcttaacgaagctatcttcggtattgaaccaaacgaatcagttgtttttgatgttgtaatcagccaacgcgctagccttcgccaaggaactcacgcggttaaaaaccgttcagcagtatctggtggtggacgtaaaccatggcgtcaaaaaggaactggacgcgctcgtcaaggttctatccgctcaccacaatggcgtggtggtggtgttgtctttggaccaactccacgttcatacggctacaaacttccacaaaaagttcgtcgccttgcgttgaaatcagtttattcagcaaaagttgctgaagataaatttgtagctgtagaaaacctttcatttgcagctccaaaaactgctgaatttgcgtcagttctttcagcacttagcattgattcaaaagtacttgtaatccttgaagaaggtaacgaatttgctgcactttcagcgcgtaaccttccaaacgttacagttgctactgcaactactgcaagtgttcttgatatcgttaacgcagacaaacttcttgttactaaagaagcaatctctacaatcgagggggttcttgcataatgaatttgtatgacgtaatcaaaaaacctgttatcactgagaaatcaatggttgctcttgaagcagggaaatatacatttgaagttgacacacgtgcacacaaacttttgatcaaacaagctgttgaagctgcatttgacggagtaaaagttgcaagtgtaaacactgtgacagttaaacccaaagcaaaacgtgttggtcgttacacaggtttcacttcaaaaactaaaaaagctattatcactcttacagctgattcaaaagcaatcgagttgtttgctgctgaagctgaataatctaaggaggaaataacgtgggtattaaagtttataaaccaacgacaaatggccgtcgtaatatgacttctttggattttgcagaaatcactacaaacactcctgagaaatcattgcttgtttcactaaagaataaagcaggacgtaacaacaacggacgtattactgttcgtcaccaaggtggtggacacaaacgtcattaccgtttgattgacttcaaacgtaataaagatggtgttgaagcagttgttaaaacaattgaatacgatccaaatcgtactgcaaatattgctcttgtacactatactgatggtgttaaagcttacatccttgcgcctaaaggccttgaagtaggtcaacgcattatttctggtccagaagcagacatcaaagttggtaacgcacttccgcttgctaacattccagtcggtacagttatccataatattgaattgcaaccaggtaaaggtgctgaattgattcgtgccgctggtgcttctgctcaagtacttggtcaagaaggtaaatatgttcttgttcgccttcaatcaggtgaagtacgtatgatccttggtacttgccgtgcaacaattggtactgttggtaatgaacagcaatcacttgttaacattggtaaagcaggacgtaatcgttggaaaggtgttcgccctacagttcgtggttctgtaatgaaccctaacgatcacccacacggtggtggtgaaggtaaagcaccagttggtcgtaaagcaccatctactccatggggtaaacctgcgcttggacttaaaactcgtaataagaaagctaaatcagacaaacttattgttcgtcgtcgtaaccaaaaataataggttaatagcataatcttatacaaatccgccagctcggtagtacactatagtgtacaggccgttgtggtacattatttaaaggagaaaactacaaaatgggacgtagtcttaaaaaaggacctttcgtcgacgagcatttaatgaaaaaagttgaagctcaagcaaatgacgaaaagaaaaaagtaatcaaaacttggtcacgtcgttcaacgattttcccaagtttcatcggatacacaatcgcagtttatgatggacgtaaacatgttcctgtttatatccaagaggacatggtaggtcacaaacttggtgaatttgcaccaacacgtacttacaaaggtcacgcagctgacgacaagaaaacacgtcgttaataggaggaggacacaatggcagaaattacttcagctaaagcaatggctcgtacagtgcgtgtttcacctcgtaaaacacgtttagtacttgatcttatccgtggtaagaatgttgctgacgcaatcgcaatcttaaaattcactccaaacaaagcagctcgtgttattgagaaaactcttaactcagcaattgcaaatgcagaaaacaactttggtttggaaaaagcaaacttggtagtatctgaaacattcgctaacgaaggaccaacaatgaaacgtttccgtccacgtgcgaaaggttcagcttcaccaatcaacaaacgtacaactcacgtaactgtagttgtatcagaaaaataaggaggtaaaatcgtgggtcaaaaagtacatccaattggtatgcgtgtcggaatcatccgtgactgggatgcgaaatggtatgctgaaaaagaatacgcggattaccttcatgaagatcttgcaatccgtaaattcattaataaagaattagctgacgcatcagtttcaactattgaaattgaacgtgcagtaaacaaagttattgtttcacttcacactgctaaaccaggtatggttatcggtaaaggtggagcaaacgttgacgctcttcgtggtcaacttaacaaattaactggaaaacaagtacacatcaacatcattgaaatcaaacaacctgatttagatgctcaccttgttggtgaaaatattgctcgtcaattagagcaacgtgttgctttccgtcgtgctcaaaaacaagcaatccaacgtacaatgcgtgcaggagctaaaggtattaaaactcaagtttctggtcgtttgaacggtgctgatatcgctcgtgctgaaggttattcagaaggaactgttccgcttcacacgcttcgtgctgatatcgactatgcttgggaagaagctgacacaacttatggtaaacttggcgttaaagtttggatttaccgtggagaagttcttccagctcgtaaaaacactaaaggaggcaaataacaaatgttagtacctaaacgtgttaaacaccgtcgcgaattccgtggaaaaatgcgcggtgaggctaaaggtggtaaagaagtttcattcggtgaatacggacttcaagctacaactagccactggattacaaaccgtcaaatcgaagctgcccgtattgcgatgactcgttacatgaaacgtggtggtaaagtttggattaaaatcttcccacacaaatcatacactgcaaaagctatcggtgtacgtatgggttctggtaaaggggcacctgaaggttgggtagcaccagttaaacgtggtaaagtgatgtttgaaattgctggtgtttctgaagaagttgcacgtgaagcattacgtcttgctagccacaaattaccagttaaatgcaaattcgtaaaacgtgaagcagaataaggagaagacatgaaacttcaagaaattaaagattttgttaaagagcttcgtggattgtctcaagaagaacttgctaagaaagaaaacgaactcaaaaaagaattgtttgatcttcgtttccaagctgcagcaggtcaacttgaaaagactgctcgccttgacgaagttaagaaacaaattgcacgtgttaaaactgtgcaatcagaaatgaaataatagattgggaaaggagaaattctaaatggaacgtaatcaacgtaaaactctttacggacgcgtagtgtctgacaagatggacaaaacaatcacagttgtagttgaaactaaacgtaaccacccagtctatggtaaacgtatcaactattctaaaaaatataaagcacatgatgaaaacaacgttgctaaagaaggcgatatcgttcgtatcatggaaactcgcccactttcagctacaaaacgtttccgtcttgtggaagtagtggaaaaagctgttattatctaatcaaactaaaaggagaaaattgaaatgattcaacaagaaactcgcttgaaagttgctgataatagcggtgctcgtgagatcttgactatcaaagtacttggtggttcaggacgtaaattcgctaacatcggtgacgtaatcgttgcttctgtaaaacaagctactcctggtggagcagttaaaaaaggtgatgtggttaaagctgttatcgttcgtacaaaaactggtgcacgccgcccagacggttcatacatcaaatttgacgacaatgctgctgtaatcatccgtgacgataaaactcctcgcggaactcgtatctttggcccagttgcacgtgaattgcgtgaaggtggctacatgaagatcgtttcattggcaccagaagtactttaatctcagattaacaaacgtagtcccctaggatttcctagggtgcctttcgaggcgtaagaaaaataggagaaaaactcaaatgtttgtaaaaaaaggcgacaaagttcgcgttattgctggtaaggacaaaggcactgaagctgtagttcttaaagctcttccaaaagtaaacaaagttgttgttgaaggcgtagccctcatcaagaaacatcaaaaaccaaataacgaaaaccctcaaggcgctatcgttgaaaaagaagctccaatccatgtgtcaaacgttcaagttcttgataaaaatggtgtagcaggacgtgttggttacaaagttgttgacggcaaaaaagttcgttacaacaaaaaatcaggcgaagtgcttgattaatcacgaaggaaaggagaagcataatggcaaatcgcttaaaagaaaaatatactaatgaagttgttcctgcgttgacagaaaaatttaactattcatctgttatggctgtgccaaaagttgagaaaatcgttcttaacatgggtgttggtgatgctgtatcaaacgctaaaaatcttgagaaagctgctgctgagttagcacttatttcaggtcaaaaaccacttattactaaagctaagaaatcaatcgctggcttccgtcttcgtgaaggtgtagcgatcggtgcaaaagttaccctgcgcggtgaacgtatgtacgaattcttggataaattagtttctgtttcacttccacgtgtacgtgacttccatggtgttccaacgaaatcatttgatggacgtggaaactacactcttggagttaaagaacaattgatcttcccagaaatcaactttgatgacgttgataaagtacgtggtcttgatatcgttatcgttactactgctaacactgatgaagagtcacgtgaattgctaaaaggccttggaatgccttttgcaaagtaatctaggaggtaaataaattggctaaaaaatctatgattgctaagaacaaacgcccagcgaagttctctacgcaagcttacactcgttgtgaaaaatgcggacgtccacactcagtttaccgcaaattccaactttgccgtgtttgcttccgtgacttggcttataaaggtcaagtaccaggcgtaactaaagcatcttggtaataaattaatgatgctttgtgtttaaaaggtgtcgttgataatggcactgatttttaaacgcaaatatactaagacctagtcttacaacgtccgtaaggactcattaattagcaagtgattcaattcaaactgctaataagaggagaattaaaaaatggttatgactgacccaattgcagactttttaactcgtattcgtaatgctaaccaagcaaaacatgaagtgttagaagtacctgcatcaaacattaaaaaagggattgctgatatccttaaacgtgaaggttttgtaaaaaacgttgaagttattgaagatgacaaacaaggcatcatccgtgtgttccttaaatatggacaaaatggtgaacgtgttatcactaacttgaaacgtatttcaaaaccaggtcttcgtgtttatactaaacatgaagatatgcctaaagttcttaacggacttggtattgcaattgtatcaacttctgaaggtcttttgactgacaaagaagctcgccaaaaaaatattggtggagaagtacttgcatatatttggtaaaattttacctaaaatgctcattgagtcacagtataatcctgtgttctcatgagtccccgtgaaaactagttgctcaagcagcttgacaatttaacaggagaaaataaacatgtcacgtattggtaataaagtaattacattgcctgcaggtgttgaaatcattaacaaggataatgttgttactgtaaaaggacctaaaggccaactcactcgtgagtttaataaaaatattggaatcactgttgaagggactgaagtaacagttactcgtcctaacgactcaaaagaaatgaaaacaattcatggtacaactcgtgcgaacttgaacaacatggttgttggtgtttctgaaggtttcaaaaaagctcttgaaatgcgcggtgttggttaccgtgcacaacttcaaggatcaaaacttgttctttctgttggtaagtctcaccaagacgaagttgaagctccagaaggtgttacttttgaagtgccaactccaacaacaatcaacgtaatcggtatcaacaaagaaagcgttggacaaactgctgcttacgttcgtagcttacgttcaccagaaccatataaaggtaaaggtattcgttacgttggtgaattcgtacgccgtaaagaaggtaaaacaggtaaataataggattgatagattttgtagaatcttttctgcaaattctctatcttttcattttaatattgtcattttgacataacaatatatttaagaggtgaaaattgtgatttcgaaaccagataaaaataaaatccgccaaaaacgccaccgtcgtgttcgcggtaaactctctggaactgctgatcgcccacgtttgaacattttccgttctaatacaggcatctacgctcaagtaattgatgacgtagcgggtgtaacgctcgcaagtgcatcaactcttgataaagaagtttctaacggaacaaaaacagaacaagccgttgttgtcggtaaacttgttgctgaacgcgcagtagctaaaggtatttctgaagtggtgtttgaccgcggtggatatctctatcacggacgtgtaaaagctttggctgactcagctcgtgaaaacggattgaaattctaatagggaggacacttaataatggcatttaaagataatgcagtagaacttgaagagcgcgttgttgcgattaaccgcgttacaaaagttgttaaaggtggacgtcgtctacgttttgcagctcttgtagttgttggtgaccgtaatggtcgtgttggttttggtacaggtaaagctcaagaagtaccagaagctattcgcaaagctgttgaagctgctaagaaaaacatggttgaagttcctatggtcggtacaacaattcctcacgaagttcgttcagaatttggtggagcgaaagtattgttgaaaccagctgttgagggtgctggggttgccgctgggggtgctgttcgtgccgtcatcgaattagcaggtgttgcagatattacatctaaatcacttggttcaaacactccaatcaacattgttcgcgcaactgttgagggcttgaaacaattaaaacgtgcagaagaagttgctgctttacgtggcatttctgtttctgacttagcataagaaaggggattataatggctcaaattaaaattactttgactaagtctccaatcggtcgcaaaccagaacaacgtaaaacagttgttgcccttggacttggtaaattaaactcttcagttgttaaggaagataatgctgccatccgtggtatggttaacgctatctctcacttagtaactgttgaagaagcttaattaaatgctaaatcgcactgattgttattggtgcgatttaaacaaatcgtataggcgagtctttgcggggagtaccttttccctcgtaaaggcgttagcattttacaaataaggagaaaaaataatgaaacttcatgaattaaaacctgcagaaggatcacgtaaagtccgcaatcgtgtgggtcgcggtacatcttcaggtaatggtaaaacttctggacgtggtcaaaaaggacaaaaagcgcgtagtggtggtggagtacgccttggttttgaaggtggacaaactccattgttccgtcgtatgccaaaacgtgggttctcaaacatcaatgcaaaagaatatgctcttgtgaaccttgaccaattaaatgtctttgaagatggtactgaagtaactccagttgttcttaaagaagctggaatcgtgcgtgctgaaaaatcaggcgttaaaattcttggtaatggtgaattaactaagaaattgtctgttaaagcagctaaattttctaaatctgctgaagcagctatcactgctaaaggtggttcaatcgaagtcatctaattaatgagaggtaactcattatgtttttaaaattacttagagatgcactcaaagtaaagatggtaagaaataaaattttatttactatctttatccttcttgtatttcgtatcggaacgcatatcacagtaccgggcatcaatgttaagagtttagaacaaatgggtgaacttccatttctaaatatgcttaacttagttagtggtaatgcaatgagaaacttttcggtattctctatgggagttagcccttacattactgcgtctattgttgttcagttacttcaaatggatattcttccgaagtttgttgaatggggaaaacaaggagaggtaggtcgtcgtaagcttaaccaagctacacgttatatttctttgttccttgcattcgtacaatcaattggtattactgctggttttaacactctatcaagtgttgctttagttaaaactccgaatgtacaaacatatttgcttattggtgcaatccttacaacaggtagtatggtggttacttggctaggtgaacaaattactgataagggattcggaaatggagtgtctatgattatctttgcgggtatcatttcttccattccaagtgcaattacaactatctacgaagatttctttgtaaatgtacgctcttcagcaattacaaattcttacatctttgtcgggatccttatcgtagcagtattagcaattgtattttttacaacatttattcaacaagctgaatacaaaattccaatccaatatacaaaacttgttcaaggagctcctacaagttcatatcttcctctaaaagtaaatccagctggtgttattcccgttatctttgctagctcgattacaacaattccaagtacgattattcctttctttcaaaatggcaaagaaattccttggcttactaaactccaagaattacttaattatcaaaccccagtcggtatgattatctatgctatcttgattattctgttctctttcttctatacttttgtacaagtaaaccctgaaaagacagcagagaatcttcaaaaaaattcgtcctacattccaagtattcgaccaggacgagaaacagaagaatatatgtcatcgctattgaaaaaattagcaacaattggttcagtatttctagcatttatttccttgttaccaattattgctcaacaagcgttgcatttgtcatcaagtattgcgttaggtgggacaagcttactcattttgattgcaacgggtattgaaggtatgaaacaactcgagggctatcttttgaagagacgctatgttggattcatgaatacaacagaatagaatataggttgactctgtcaaccttctattttgttttttaataagtccgacatgctgtgttggatttatttaaaaacaaaataaggagactataatgaatcttttaattatgggtttgcctggtgctggtaaaggtactcaagcagctaagatcgttgaagaatttggtgttgctcacatctcaacaggggatatgttccgcgccgcaatggctaatcaaaccgaaatgggacgtttagctaaaagttatattgataaaggtgaattggttcctgatgaagtaacaaacgggattgtaaaagagcgcttagctgaggatgatatcgcagaaaaaggttttttacttgatggatatccacgtactattgaacaagcacacgccttagatgctacgcttgaagaactaggactacgcttagatggtgttattaatattaaagtggatccatcatgtcttatagagcgtttgagtggtcgtattatcaatcgtaaaactggtgaaactttccacaaagtgttcaacccaccagtagattataaagaagaagattactatcaacgtgaagatgataagcctgaaactgtcaaacgtcgcttggacgttaatattgctcaaggagaacctattcttgaacactatcgtaagcttggtcttgttacagatattgaaggtaatcaagaaataacagaagtttttgcagatgttgaaaaagcgttgctagaactcaaataaattatgctaatctacttgcataagtagattagtaatgatatactaagttagtctgacttataattgttacctctttatagaggacatcaaatcgaaatttagggggtacttttgcgtggcaaaagaagatgtgattgaaattgaaggtaaagttgttgaaactatgcctaacgcaatgtttactgttgagttggaaaatggacaccaaattttggcaactgtatcaggaaaaatccgtaaaaactacatccgtattttggtaggtgatcgtgttactgttgaaatgagcccatacgatttaacacgtggacgcatcacataccgctttaaatagtcgaaataattggagggattaaaacatgaaggtaagaccatcggttaaaccaatttgcgaatactgtaaagttattcgtcgtaacggtcgtgttatggtaatttgtccgacaaacccaaaacacaaacaacgtcaaggataatatagaaaggagataaaatggctcgtattgctggagttgatattccaaatgacaaacgtgtagtaatttcacttacttatgtatacggaattggtctttctacatctaaaaaaatcttagcagctgcaggtatttctgaagatatccgcgttaaagatttgacaccagatcaagaggacgctatccgtcgtgaagttgatgcaatcaaagttgaaggtgacctacgtcgtgaggtaaacttgaatattaaacgtttgatggaaatcggttcataccgtggaatccgtcaccgtcgtggacttcctgtccgtggacaaaatactaaaaataacgctcgcactcgtaaaggtaaagctgttgcgattgcaggtaagaaaaaataaaataggaggtaaaacaattggctaaaccaacacgcaaacgtcgtgtgaaaaagaacatcgaatctggtgttgctcatattcacgctacattcaataacactattgttatgattacagatgtgcatggtaacgctcttgcatggtcatcagctggtgctcttggatttaaaggttctcgtaaatctactccatttgctgctcaaatggctgctgaagctgctgctaaatctgcacaagaacacggtcttaaaactgttgaagttactgtaaaaggtcctggttcaggtcgtgaatctgctatccgtgcccttgctgcagctggtcttgaagtaactgcaattcgtgatgtgactcctgtaccacataatggtgctcgtcctccaaaacgtcgtcgtgtataatcatagcattttatagtacacaacttttcgtttaagagggagtaactaaatgattgagtttgaaaaaccaataataacaaaaattgatgaaaataaagattacggcagatttgtcatcgaaccactagaacgtggctacggtacaactctaggaaactctcttcgtcgtgtgcttctgtcttcacttccaggtgcagcagtcacatcaatcaaaattgatggagtattacacgaatttgatactatcccaggtgtacgtgaagatgtgatgcaaatcatccttaatgtaaaaggacttgctgtgaaatcttacgtcgaagacgaaaagattatcgaactagacgttgaaggtcctgcagaaattactgccggagatattttaacagatagtgatatcgaaattgtaaaccctgaccattatcttttcacaattgctgaaggtcacagtttgaaagcaacaatgacagttgctaaaaaccgaggttatgttccagcagaaggaaataaaaaagatgatgcaccagtgggaacattggctgtagattcaatctatacaccagtgaaaaaagttaattatcaagttgaacctgctcgtgtaggtagtaacgatggctttgataaattaactattgaaatcatgacaaatggcacaatcattcctgaggatgctcttggtctttcagctcgcgtcttaattgaacacttaaacttgtttactgatttaacagaggttgctaaagcaactgaagtaatgaaggaaacagagaaagtgaacgatgagaaagtgcttgaccggacaattgaggaacttgatttgtcagtgcgctcatataactgtttaaaacgtgctggaattaatacagtatttgatttaacagaaaaaactgagcctgaaatgatgaaagtccgaaacttaggacgtaagagtcttgaagaagttaaaatcaaacttgccgatctaggtcttggattaaaaaacgataaataaaataggaggacataatggcttaccgtaaactaggacgcactagctcacaacgtaaggcaatgcttcgtgatttgacaaccgatcttcttatcaacgaatcaattgtaactactgaagcacgtgctaaagaaatccgtaaaacagttgaaaaaatgattactctaggtaaacgtggtgatttacatgctcgtcgtcaagctgctgcttatgtacgtaatgaaattgcatcagaaaactatgatgaagcttctgataaatatacatcaacaacagctcttcaaaaactttttgacgacatcgcacctcgttatgctgaacgtaacggaggatacactcgtattcttaaaacagaaccacgccgtggcgatgctgccccaatggcaattattgaattagtataatttttatcaattttgttgagtgttatgatgatggaatcaatcgattcttagtctagctctggtctaccgctgagaattattctcagcgggaacactcatcatatattgttaaataggtaacgcttgtttacgaaatgcaaacaattttgtttatatttcgtaagcaggcgttttatgcattattatatttattggatattttcgatgagcaaagaatttaatcgctagactacatttctcaatagtggttatataatttctcttaattgaatatagaggaatagttatgtctatactaaatttataaaatacaaaaatagtattgacaggaagtagaaatatttagtataatgaataagttgtctcgagagagcagtttctattagcgcgtagttaacaacttaaaaaaagtagttgacaaagcagaataagtttgctagaatatagaagttgtctcaagagaggcaaagacctttgaaaactgaacaagacgaacgaatgtgcagggtggatttacattgtaaatccgtcaatgacaaaaaacaataaatctgtcagcgagacagaaaagagcaaagctcaaacttttaatgagagtttgatcctggctcaggacgaacgctggcggcgtgcctaatacatgcaagtagaacgctgaggtttggtgtttacactagactgatgagttgcgaacgggtgagtaacgcgtaggtaacctgcctcatagcgggggataactattggaaacgatagctaataccgcataagagtaattaacacatgttagttatttaaaaggagcaattgcttcactgtgagatggacctgcgttgtattagctagttggtgaggtaaaggctcaccaaggcgacgatacatagccgacctgagagggtgatcggccacactgggactgagacacggcccagactcctacgggaggcagcagtagggaatcttcggcaatggacggaagtctgaccgagcaacgccgcgtgagtgaagaaggttttcggatcgtaaagctctgttgttagagaagaacgttggtaggagtggaaaatctaccaagtgacggtaactaaccagaaagggacggctaactacgtgccagcagccgcggtaatacgtaggtcccgagcgttgtccggatttattgggcgtaaagcgagcgcaggcggttctttaagtctgaagttaaaggcagtggcttaaccattgtacgctttggaaactggaggacttgagtgcagaaggggagagtggaattccatgtgtagcggtgaaatgcgtagatatatggaggaacaccggtggcgaaagcggctctctggtctgtaactgacgctgaggctcgaaagcgtggggagcaaacaggattagataccctggtagtccacgccgtaaacgatgagtgctaggtgttaggccctttccggggcttagtgccgcagctaacgcattaagcactccgcctggggagtacgaccgcaaggttgaaactcaaaggaattgacgggggcccgcacaagcggtggagcatgtggtttaattcgaagcaacgcgaagaaccttaccaggtcttgacatccttctgaccggcctagagataggctttctcttcggagcagaagtgacaggtggtgcatggttgtcgtcagctcgtgtcgtgagatgttgggttaagtcccgcaacgagcgcaacccctattgttagttgccatcattaagttgggcactctagcgagactgccggtaataaaccggaggaaggtggggatgacgtcaaatcatcatgccccttatgacctgggctacacacgtgctacaatggttggtacaacgagtcgcaagccggtgacggcaagctaatctcttaaagccaatctcagttcggattgtaggctgcaactcgcctacatgaagtcggaatcgctagtaatcgcggatcagcacgccgcggtgaatacgttcccgggccttgtacacaccgcccgtcacaccacgagagtttgtaacacccgaagtcggtgaggtaaccttttaggagccagccgcctaaggtgggatagatgattggggtgaagtcgtaacaaggtagccgtatcggaaggtgcggctggatcacctcctttctaaggataaggaaacctgccatttgcgtcttgtttagttttgagaggtcttgtggggccttagctcagctgggagagcgcctgctttgcacgcaggaggtcagcggttcgatcccgctaggctccattgaatcgaaaggttcaaattgttcattgaaaattgaatatctatatcaaattccacgatctagaaatagattgtagaaagtaacaagaaaataaaccgaaaacgctgtgaatatttaatgagttttctagttttaaagaaactaggttaataaggttaagttaataagggcgcacggtggatgccttggcactagaagccgaagaaggacgtgactaacgacgaaatgctttggggagctgtaagtaagcgctgatccagagatgtccgaatgggggaacccactagttaatgactagtatccatatctgttaaggatatgagaaggaagacgcagtgaactgaaacatctaagtagctgcaggaagagaaagcaaaagcgattgccttagtagcggcgagcgaaacggcaggagggcaaaccgaagtgtttacacttcggggttgtaggactgcgatataggattaatcattatagaagaattacctgggaaggtaagccaaagagagtaacagcctcgtatttaaaatgatagattaaccttagcagtatcctgagtacggcgagacacgcgaaatctcgtcggaatctgggaggaccatctcccaaccctaaatactctctagtgaccgatagtgaaccagtaccgtgagggaaaggtgaaaagcaccccgggaggggagtgaaatagaacctgaaaccgtgtgcctacaacaagttcgagcccgttaatgggtgagagcgtgccttttgtagaatgaaccggcgagttacgatatgatgcgaggttaagttgaagagacggagccgtagggaaaccgagtcttaatagggcgtcatagtatcatgttgtagacccgaaaccatgtgacctacccatgagcaggttgaaggtgaggtaaaactcactggaggaccgaaccagggcacgttgaaaagtgcttggatgacttgtgggtagcggagaaattccaaacgaacttggagatagctggttctctccgaaatagctttagggctagcgtcgatgttaagtctcttggaggtagagcactgtttgggtgaggggtccatcccggattaccaatctcagataaactccgaatgccaacgagatataatcggcagtcagactgcgagtgctaagatccgtagtcgaaagggaaacagcccagaccaccagctaaggtcccaaaatatatgttaagtggaaaaggatgtggggttgcacagacaactaggatgttagcttagaagcagctattcattcaaagagtgcgtaatagctcactagtcgagtgaccctgcgccgaaaatgtaccggggctaaaacatattaccgaagctgtggatgacacaaaagtgtcatggtaggagagcgttctatgtgtgaagaaggtgtaccgtgaggagcgctggaacgcatagaagtgagaatgccggtatgagtagcgcaagacaggtgagaatcctgtccaccgtaagactaaggtttccaggggaaggctcgtccgccctgggttagtcgggacctaaggagagaccgaaaggtgtatccgatggacaacaggttgatattcctgtactagagtatatagtgatggagggacgcagtaggctaactaaaccagacgattggaagtgtctggtcaaacagtgaggtgtgatatgagtcaaatgcttatatctttaacattgagctgtgacgaggagcgaagtttagtagcgaagttagtgatgtcacactgccaagaaaagcttctagcgatacatatactctacccgtaccgcaaaccgacacaggtagtcgaggcgagtagcctcaggtgagcgagagaactctcgttaaggaactcggcaaaatggccccgtaacttcgggagaaggggcgctgattttagatcagccgcagtgaataggcccaagcaactgtttatcaaaaacacagctctctgctaaatcgtaagatgatgtatagggggtgacgcctgcccggtgctggaaggttaagaggagtgcttagcgtaagcgaaggtatgaattgaagccccagtaaacggcggccgtaactataacggtcctaaggtagcgaaattccttgtcgggtaagttccgacccgcacgaaaggcgtaatgatttgggcactgtctcaacgagagactcggtgaaattttagtacctgtgaagatgcaggttacccgcgacaggacggaaagaccccatggagctttactgcagtttgatattgagtatctgtaccacatgtacaggataggtaggagcctatgataacgggacgccagtttcgtttgaggcgttgttgggatactacccttgtgttatggctactctaacccagataggcaatccctatcggagacagtgtctgacgggcagtttgactggggcggtcgcctcctaaaaggtaacggaggcgcccaaaggttccctcagactggttggaaatcagtcgtagagtgtaaaggtataagggagcttgactgcgagagctacaactcgagcagggacgaaagtcgggcttagtgatccggtggttccgtatggaagggccatcgctcaacggataaaagctaccctggggataacaggcttatctcccccaagagttcacatcgacggggaggtttggcacctcgatgtcggctcgtcgcatcctggggctgtagtcggtcccaagggttgggctgttcgcccattaaagcggcacgcgagctgggttcagaacgtcgtgagacagttcggtccctatccgtcgcgggcgtaggaaatttgagaggatctgctcctagtacgagaggaccagagtggacttaccgctggtgtaccagttgtcttgccaaaggcatcgctgggtagctatgtagggaagggataagcgctgaaagcatctaagtgcgaagcccacctcaagatgagatttcccatgattttatatcagtaagagccctgagagatgatcaggtagataggttaggagtgtaattgtggtgacacatttagcggactaatactaatagctcgaggacttatccaaaaagagatattgacaacgttacggtttcttgttagactatagatattcaattttgagtgaataaggctcaatagttaagtgataattgcctaggagatacacctgttctcatgccgaacacagaagttaagccctagaacgccggaagtagttgggggttgccccctgtgagataaggtagtcgcttagcaaagggagtttagctcagctgggagagcatctgccttacaagcagagggtcagcggttcgatcccgttaactcccataggtcccgtagtgtagcggttatcacgtcgccctgtcacggcgaagatcgcgggttcgattcccgtcgggaccgtagactcgttagctcagttggtagagcaattgacttttaatcaatgggtcactggttcgagcccagtacgggtcatttagaaatgcgggtgtggcggaattggcagacgcaccagatttaggatctggcgcttaacggcgtgggggttcaagtcccttcacccgcattagtagattgccggcttagctcagttggtagagcatctgatttgtaatcagagggtcgcgtgttcaagtcatgtagccggcattaactttataattttagaagttattttgggcgcgtagctcaggtggttagagcgcacgcctgataagcgtgaggtcggtggttcgagtccactcgtgcccatcaagaatatggtccgttggtcaaggggttaagacaccgccttttcacggcggtaacacgggttcgaatcccgtacggactattttttgttatatggaggattacccaagtccggctgaagggaacggtcttgaaaaccgtcaggcgtgtaaaagcgtgcgtgggttcgaatcccacatcctcctttaaagatatcgcgggatggagcagctaggtagctcgtcgggctcataacccgaaggtcgtaggttcaaatcctgctcccgcaataggctcggtagctcagttggtagagcaatggattgaagctccatgtgtcggcggttcgattccgtctcgcgccatttataccttaggagagatagcgaagaggctaaacgcggcggactgtaaatccgctccttcgggttcgggggttcgaatccctctctctccatagtaaacgggcatagtttaaaggtagaactaaggtctccaaaaccttcagtgtgggttcgattcctactgcccgtgttttttctaatatggcgggtgtggtgaagtggttaacacatcagattgtggctctgacattcgtgggttcgattcccatcactcgccttttcatggggtatagccaagcggtaaggcaagggactttgactccctcatgcgttggttcgaatccagctaccccagttttaagatagccggcgtggcggaattggcagacgcgctggactcaaaatccagtgtcctcacggacgtgccggttcgaccccggccgccggtatatttataaagacaaggtttagaagccttgtcttttttgtattgtgctggtaattttgagaaaaagttactgaaaattacttatatttgtttttcattattgcaatcgttatagaaggtttaaaacaagcagaaataataaggaaatttttcaagagttagtggagactcaacatttaaatgaaattcaaagaggactcctaaatgtcataggttctgaagtaataaaagtgtttgtgaatgatagataggtagtataaaataataagatttttcagtgtatatgttacgactaaaaaattaaactcgtgaaaatttgttatactaatattagttttaacatactggtaaataataattatttttattagatacttgacatgggaagtttattttctaagaaaagagagcatgttgaaaaaatatgtaaaatggttaattcccatatctattattgggatgttactagcaggctgtcaaatgaatagtgaatctaaaagtcagtcaaacgaagtaaaaaatagcaaacagtcagcagtaaagaaaggtaaaaaagtaataaaaaaagaacaagtagcttatctcaaaaagcatgaaaaagaattaactgaatatgtcaaaatccagatattagtgaaattaagtatgattggaatagtgtgcgcatagtggaagctagtagtggaacccctcaaggcggagagcaactattattaattttgggttatgcaaatggcagtgaattaaccaattttactctaaatttcacattgggtgataatcaaatgcctaatattgactcagttggctcagataatttatcaactattgaagattaataataacaataagaaaggtatataatgggatgatggaatcttaaggaatttgaagatatattttgaagtatggcagaaagtgctaatacaggtcgatcgaattcttttgttttagaagaattaactgaatttcaaagagaaaagttaaaaaatggggagtcagttaagtttaatttttctaaagatgttaagaaagaaaataaggttatcgaaggagggcacccccaagtcatagggtaatctacctgcaaactggataagtccttaaatacaattgatgaaaaagtagaggttcgcgttcctgatgtcaatggcggttatcactctgagcattgtgttactaattcctatcagaaaggttactgaaagatgatgaagcagtaactctataatcactaaaagctcatcattgcttagtgtttaagttaacttctaaagctcaaaccttgttaaatcaaggtctgtttgcttttaaaagtgacatgttatttttctaaaaatgagattattgggattcctcattctaagttactttgtttatatgtacctttacttaaggtttattttcattatttttaatttaatattttggagtatgtatgctccattatagtattttcgaagacatctttaaaaggactgtagaagttaaaatattttaacctagtatctaacgtcatatattggtacatagttttaagtatccttttgataaccttgtacatatgaaataggctagatatttttagtgaactaaatgtaagtttattgcttgtattaggcgggataacaatattgttgtttttattctttctgagtaatggtttattaatcatgtaattattctggtatcaaatgatacttttaatattccagtttgtcaataaatcatcaatgtaattcttttcatcaaaagcgatccctttatctagttgatttaatatgttaacttgatgattgttcttcttgcttaatatatgggataataattatcttaaattgacacttggagcattcaatcacgtgatgtaataactaaaaattgtttaaaatttaaggatgtatttcttgttgatcttactatctgatctaataatagtatataataagattaaaatttaaacattgtctggagatgtagcaaaggagataaaatgactaaaatttatcatatgattttatgtaattctgatataatgaagattttagctataataaaatctcttccactgaatgattgttggctgtgtgctggcacattgagaaactttgtatggaataaactttctggaataaatgagacattgacatcagatattgatgttgtattttttgataaaaatatttcttatgaagaaacggtggtattagaacaacaattaaaggataactatccacagtacgattgggaacttaaaaatgaattttacatgaacactcattctcctaataccccaaagtatactagctctaaagatgctatttcaaaatttcctgaaaagtgtactgcagtgggagcaaggttagatgatagaaatcaactcgaactttacctcccttatggtgaagaggaaatattaaatttcattgttagtcctacgccatattttgaagaggatctattacgttataatgtttatttgaagcgagtggataagaagaaatggaataatatttggcctcgtttaacaatcataaaaaaatgataacgttactggagttggcttaacagcttttaaatttttagactgacaaatagtatagacctttaataaggtcgtttatcgataatcatagtgtactgtgttataatcgttatagcataaaaacacgttgcagttggtagtctgcaagcgttcagtgaacgtcagtaaccttccctccaggtcgtccattgcaatttaatatttaaaggagggggctgtatgaaaatgacagtctattttgatggtaatttttggttgggtttgattgagtacgatgatgatggtgattacaaagtttttcggtatttttttggaaaagaacctaaagatgatgatgtttttaattttataaatcataaacttaatgatttgataaaaaaatatgagtttgttaaaacggatatttctctaaagcgtacgaatgaacacaaaaaaagtcctaaaagaatgcaaagagaaattaatagagaaaaacgtaagccagtagtatctacaaaagcgcaattggcgatgaaaactattcatatgagtataaaaaacgaacgtcaattaagtcagaaatgtaagaaaaatgagttaagaaaacatcggtaccaattaaaacaagaaaaacgttaccaaaagaaaaaaggacattgattgtgtcatcatataaaaagcttgagagtgtcatctcaagctttttatatgttaactaatatgagtcactaaatagtctgataatgctcaattaatgtgttttgggaaaaaatcatttccttaaaggacaccattgtcatgttgttatcaccttactttttttatacttagtatatgtttaagaaaggaataagttgttttgagagattttgaggagttgtttgataaagtaaagccaatcgtaatgaagctgagaagaaattattttgttcaactttgggaatatgatgattggattcaagaaggacgtattgtactttttaggttgcttgaagagcatccgtatttattggataatgaaagcaaactattcatttactttaaaacaaaattttcaaattatttaaacgatgtattaagacaccaagattgtcaaaagcgacaatttaataaaatgccttatgaagaaataagtgaagttagtcactatgttaagagtaaaggactagttttagatgactatattgcttatcgtgatactttaacaaaagtggaagaaactttgtcagatattgataaagaaaaatttgaaaaactgattagtggtgaacgttttgcggggaagaaacaattcatacgagatattcaaccctttttcaatgcttttaaagcggattaatcgattttatttctgcagtagatagctgcagaatttttttatagggaaagttcgctgatatattcctgtgaaagcctttgttttttgttataatataataaaatgcttgtgaggtgtcagtatgagtaaagttcgtttatatatcgctcgtcatggtaaaacaatgtttaatacaattggtcgcgctcaggggtggagtgatactcctttaactacttttggagaactcgggattaaagagcttggtttgggactaaaggcttcaaatattagttttaaagaggctttttctagtgatagtggacgtactttacaaactatggaaattattctcagggaagtgcaacaagaaaatattccctatacgagagataaacgaatccgcgagtggtgctttggtagtttggatggaggatatgatggcgacctttttaatggcgttctgcctcgagtttcaaacggagatatgagccatttgacacacgaagaaattgctaatttgatttgtcaagttgatacggctggctgggcagaaccgtgggcaatattgagtaaccgtattctgtcaggcttcactgctatagctaaaaaaatagaggatattgggggaggtaatgcgattgttgtcagtcatgggatgactattgcgacttttttatggttaatcgaccatagtacccctcgtagtttaggcttagataatggtagtgtctcagtcgttgattttgaagatggaacattttctattcaatctattggggatatgtcctatcgagaaaaaggaagagaaattttagaaaaaacattgcaatgaaaaaaaataaaattatccgattcagtttagttggtgttctacttgcgatactatgctttagtctttttgctttattgaagcctaacagtcaacaatcatcatctcaaaagttgaggaatgaggatataaaaaagatatcctctcaaaaaagaaataagaaattacaattaccagctgtatcatcaaaagattggaacttgattttggtcaatcgtgaccataaacatgaagaattaagtccagatgtggttcctgttgaaaatatttatttggataaacgtattacgaagcaagctactcagtttttagaggctgctagagcaattgattcacgagaacatttaatttcgggttatcgtagtgttgcctatcaggagaagttgttcaattcttatgttactcaagagatgactagtaaccctaatttgacgaggggacaagcagaaaagttggtaaaaacttactctcagcctgcaggtgctagtgaacaccagactggattagcgatggatatgagtactgtagattctttgaatgagagcgatcctagagtagtcagtcagttgaaaaagatagctccacaatatggttttgtcttacggtttccggatggtaaaacagcagaaacaggggtaggttatgaagattggcattaccgctatgttggggtagagtctgcaaaatatatggccaaacatcatttaacattagaagaatacataactttattaaaggagaataaccaatgaggaaacgtttttccttgctaaattttattgttgttacttttattttctttttctttattctttttccgcttttaaaccataagggaaaagtagatgctaattctaggcagagtgttacctacaccaaagaagaatttatacaaaaaattgtgccagatgcgcaagatctaggaaagtcgtacggtattcgtccttcatttattattgcacaggcggctttggattctgatttcggagagaaaatattagctaataagtatcataatctgtttggtttgcttgcagaaccaggaacgccctcaattaccttaaatgatagtagtacaggaaaaaaacaggaaaagcaatttactcattataaatcttggaagtattcaatgtatgattaccttgctcatataaaatctggagcgacaggcaaaaaagattcatatactataatggtgtctgttaaaaatccaaaaactttagtgcaaaaattacaagatagtggttttgataatgacaaaaagtacgctaaaaaaatgacggaaatcattgatttgtatgatttaacaagatatgataagtgatattagcactctttgaataagagtgctaatttttgatgttttttccttgactatcttttaaaaaggagtataataaaatcatagttagcagtcgatgtgtaagagtgctaatttcagaaagaccgagaggggtgatgtttttgtgattacacaacgtcaaaatgatattttgaatttaatcgttgagttatttacacaaactcatgaaccagtagggtctaaagctttacagagaacgattgattctagtagcgccactattcgtaatgatatggcaaaactagagaagttggggttattggaaaaagcacacacttctagtggacggatgccgagtccagctggttttaagtattttgtagagcactcccttagactagatagtattgatgagcaagatatttatcatgttataaaagcttttgactttgaagcattcaaattagaagacatgcttcaaaaagctagtcatattttatcggagatgacgggctatacatccgttattttagatgtggagccagctcgtcaacgtttgacagggtttgatgttgttcagcttagcaaccatgatgctctagcagtcatgactttagatgaatctaagccagtgacagtgcagtttgctattccaagaaactttttgacacgtgacttgatagcatttaaagctatcgtagaggagcgcttgctggatggtagtgtcatggatattcattataagttgaggacagaaattcctcagatcgttcagaagtattttgtaactacggataatgttttacaactatttgattatgttttttcagagctgtttctggaaacggtatttgtagctggcaaggtaaattctttaacgtattcagatctatcaacgtatcagtttttggataatgagcagcaagtagcgatttctttgaggcaaagtctgaaagagggtgagatggcttctgtccaagtggcagatagtcaagaagccgcacttgcagatgtgtcagttttaactcacaaatttttgattccttaccgtggatttggactcctgagtttgattggtcctattgatatggattatcgtaggtctgttagtttggtaaacattatcggaaaggtattggctgctaaattaggtgattattatcgatacctaaattctaaccattatgaagttcactgataatggcagtattcaataagttatttaaaaggaggcactcagtgtcagaagaaattaaaaaagacgatttacaggaagaagtggaagccactgaaactgaagagacagttgaggaagttattgaagaaattcctgaaaaatcagagttagaactcgcaaacgagcgtgctgatgagtttgaaaataaatacttgcgagctcatgcagaaatgcagaatatacaacgtcgctctagtgaagaacgtcaacaacttcaacgctatcgttctcaggatctggcaaaagcaatcttaccatcgcttgacaatctagaacgtgccttggctgttgaagggttgacagatgatgttaaaaaaggtttagaaatgactcgtgatagccttattcaagcactaaaggaagaaggcgtagaagaagtagaagtcgactcatttgaccacaactttcatatggcagttcagactctcccagccgatgatgaacatccagccgatagcattgcagaagtctttcaaaagggatataaattgcacgagcgtctgctaagaccagcgatggtagttgtctataactaaggtaaatgagttttcgtttttgtccgtaatgacagtaaactagatagcaagttagaagctattcagcttgctgattaaactatagtgattgcttagaattggaagtaaaataattcgagtgcttactaagataaattgaaataaaaagtaataaagtattataaaataagaggtattaacatgtctaaaattattggtattgacttaggtacaacaaactcagcagtagcagttcttgaagggactgaatcaaaaatcattgctaacccagaaggcaatcgtacaactccttcagtagtatcattcaaaaatggtgaaattatcgtgggtgatgctgcaaaacgtcaagcggtaacaaatccagatactgttatctctatcaaatcaaagatgggaacttctgaaaaagtttctgcaaatggtaaagaatatactcctcaagaaatttcagcaatgattcttcaataccttaaaggttatgctgaagactatcttggagaaaaagtagaaaaagcagttattactgttccagcttacttcaacgatgcacaacgtcaggcaactaaagacgctggtaaaattgcaggtcttgaagtagaacgtatcgttaacgaaccaacagcagccgcacttgcttatggtatggacaagactgacaaggatgaaaaaatcttagtttttgaccttggtggtggtacatttgacgtatcaatccttgaattaggtgatggtgtcttcgacgttcttgcaacagcaggtgataacaaacttggtggtgacgactttgaccagaaaattattgatttcttggtagaagaattcaagaaagaaaatggtattgatctttctcaagacaaaatggctcttcaacgcttgaaagatgctgctgaaaaagctaaaaaagacctttcaggtgtaactcaaactcaaatttcattaccgttcatcactgctggttctgctggtcctcttcacttggagatgagcttatcacgtgctaaatttgacgatctcactcgtgaccttgttgaacgtacgaaaactccagttcgtcaagctctttcagatgcaggcttgtcattgtcagaaattgatgaagttatcctcgttggtggatcaacacgtatcccagcagttgttgaagctgtaaaagctgaaactggtaaagaaccaaataaatctgttaaccctgatgaagtggttgctatgggtgctgctatccaaggtggtgttatcactggggatgtgaaagacgttgtacttcttgacgtaacaccattgtcacttggtatcgaaacaatgggtggtgtcttcactaaattgatcgaccgcaacacaacaatcccaacatctaaatcacaagtcttctcaacagcagcagacaaccaaccagccgttgatatccatgttcttcaaggtgaacgcccaatggcagcagataacaaaacactcggtcgcttccaattgactgatatcccagctgcacctcgtggaatcccacaaattgaagtaacatttgatatcgataaaaatggtattgtatctgttaaagctaaagatctcggtactcaaaaagaacaacacattgttatccaatctaattcaggattaactgatgaagaaattgataaaatgatgaaagatgctgaagcaaatgctgaagcagatgcaaaacgtaaagaagaagttgatcttaaaaatgaagttgaccaagccatctttgcaacagaaaaaactattaaagaaactgaaggcaaaggctttgatacagaacgtgatgcagcgcaatcagcacttgatgagttgaaaaaagctcaagaatcaggtaaccttgacgacatgaaagctaaacttgaagctcttaacgaaaaagcacaagctcttgcagttaaactttacgaacaagcggctgcagcacaacaagcagctcaaggggctgaaggtgcacaatcagctgattcatcaagcaagggtgatgatgttgtagatggcgaattcactgagaaataattattaatattgttcagattcatttgaatataagcatgaaaactatactagcatagtaaagttcttcgtgataggggttgctcaataatctagataagtttcagattacataagctaatttcgctatcactaaataaaaacatattaataataaataggcggggcgcctcgctccgtctgttttattaagtgtcatatatatgttaactatttagagctgtaactgggcaagaataattgttaatctcttcaagtgtagtatatgaacaaaatataaaggattagataatgaacaatacagaattttatgatcgtcttggcgtttcaaaagatgcttctcaggacgaaataaaaaaagcttaccgtaggatgtctaagaaataccatccagatattaataaggagacgggagcagaggaaaaatataaagaggttcaagaagcttatgaaaccttgagtgatacacaaaaacgtgctgcctatgatcaatatggcgctgctggggcaaatggcggttttggtggcttcgatggtggcggttttggtggcttcgatggtggtggctttggtggttttgaagacatcttctcaagcttttttggtggaggagggatgcgcaatcctaatgcaccacgtcaaggagatgacctacaatatcgtgttaatttaagttttgaagaagctatctttggagctgaaaaagaagtatcttataatcgggagtcatcatgtcatacttgttcaggaagtggagctaagccaggtactagccctgtgacttgtcaaaagtgtcatggttcgggtgtgattaatgttgatacacaaacacctctaggaacaatgcgtcgccaagtgacttgtgatgtttgtcagggtagtggtcaagaaatcaaagagaaatgtccaacatgtcatggaactggtcatgagaagaagacgcataaagtatcagttaaaatacctgcaggagttgaaactgggcaacaaattcgtttaacaggacaaggtgaagctggcttcaatggtggtccttatggtgatctctttgttattattaacgttctcccaagccaacagtttgagcgtaatggatcaacaatttattatactttgaatattagctttgtccaagctgctttgggtgatacaattgatatacctactgtccatggagcggtagaaatgtcaattcctgctggtactcagacaggaaaaacgtttcgtcttcgcggaaaaggtgcccctaaacttcgagggggtggacaaggtgatcagcatgttactgttaacatcgtaactcctactaaattgaatgatgctcaaaaagaggcattgcacgcttttgcagaggcaagtggagataagatggtacatccgaagaagaaaggtttctttgataaagtcaaagatgctttagatgttgattaaaaaataaaagtctagaatcgaaagtattctagacttttttgtattgctagagggattgcttgaacctaaattttacagtacaatgaatctaatattgtagggggacaatttttatggtaaccaaagttgaagagattcgctcatatttgatagcttctatacaaaatggtaagttggctccaggagatcgcctaccatctataagacagttagctaatcaattttcctgtaacaaagatacagtccaacgagttttgatggaattgcgttttgataattatatctatgcaaagcctaggtcaggctattacgtctttgattctcatcaagaggaagttgaagaaggggttagtttaccaaactctgagattgcaaatatagcttatgatgattttagattgtgtttgaatgagacccttattggtagggaagattaccttttcaattattactatcgtcaagaaggtcttcttgatttaagtaaagcagtggctaaattaatggaagaaacaggggtctatgttccccttgatgatattgttattacggctggtactcaacaggcattatttattttgacacaggttacctttccaaatcgaaaatctcgagttttaatagaagaaccgacctatcctcgtatgattgaactaatcaaaacacaaaatttaccctatgaaactatttctcgaggtactcatggaattgattttcagcgtttagaggagattttccagacacaatcaattaagtttttttatgttatacctcgcatgcataatcctttgggaacatcctataatccggtagagatgaaaagattaatagagatggcagagaagtatgatgtttatattgtggaagatgactatatgtctgattttgcaagtcagtcaccattacattattatgatactcacgggcgtgttatttatctaaaatctttttcaaaggctattttccctgctttaagattagctgcgatttgtttaccacaagctttaaaatcaacatttatggcttacaagaagttgatggattatgatactaatctgattttacaaaaagcattagcgctttatattgaaaatggcctttatgctaagaatagtcaatatttgaaatatcgttatcagaaagaccttgcaaattcaaaatctattttagctgatcaccctaatctaccctcatatagtttacatcacgatagtgtattatttgattgttcgaaactcgataactttaaaatattacggcaatacggcgatactttggaaaattatttttgtcaaaaatcgcatcaatctctcttacaagtaaaaaatgattcctgcttaaagcagttcttgggatcgttgtagtataattgtagggggacagtttaaaatagataatatagttttcataaatgaaaggtggtaaaataaacccatgacaaggtataaggcacagatttcttatgatggttcagctttttcaggcttccaaagacaaccaaattgtaggacagttcaagaagaaattgagagaactcttaagcgcctaaatagcgggaacgatgtgataatccatggtgctggtcgcacagatgttggtgttcatgcttatggacaagttatccattttgatttaccacaggcgcgtgatgtagaaaaattacgctttggtttagatacacagtgtccagacgatattgatattgtcaaagtagagcaagtgtctgatgattttcattgtcgatatgataaacacattaaaacttatgagtttttagtggatatcggtaggccgaaaaatcctatgatgagaaactatgcaacacattacccttatcctgtcattattgagcttatgcaagaagctattaaagatttagtaggtacccatgactttacaggctttactgcttcaggtacgagtgtagaaaataaagtacgtactatttttgatgcgaaaattcagtttgaagcgtctaaaaatcttttaatttttacctttacaggaaatggttttttgtataaacaggtgcgtaatatggttggtaccctgctaaaaattggtaatggacgcatgcctattagccaaatcaaaacaattttacaggctaaaaatcgggatttagcaggtccaactgcggcaggaaatggtttatatttgaaggagattatttatgaagacgaggaatgttttagcaatttcaggaaatgatattttctctggcggcggcttgcatgcagatttagcaacttacgttgttaataaattacatggttttgtggcagtaacatgcttaacagcaatgtcagataaagggtttgaagtcattcctatagaggcatctatactaaagcagcaactagaaagtttaaaagatgtagagtttgggtctattaaactaggattgcttcccaatgtagaaacagcacaagttgttttggaatttgtaaaatcaaaacaagaatgtccagtagtcttagacccagtcttagtttgtaaagaaaatcatgatttagaagttagccaattacgtgagcagctaattgcgtttttcccatatgctgatgtgattactcctaatttagtagaggctcaattattgacgggtctttcgattgaaaacttagatcaaatgaaaattgctgctgagaaactttacgatatgggagctaaacatgttgttatcaaagggggcaaccgtttaaatgctgaagaggctacagacctttactatgatggtgaacgttttgaaacctatgtttttcctgtagtagatgccaataatacaggtgctggatgtacatttgcgtcaagtattgccagccaattagctatgggtaaaaatgtagaagatgcagtcaaaatgtctaaaggtttcgtctatcaagctattaaagcatcggataagtacggagttgtccaacatttttaggagattttaatgaggaaagagaaaactagtcaattggttcaattggcaattgtaacagctatatctattgtattggggatgtttataagtattccgacaccaacaggttttttgacattactagatgctggaatattctttgctgccttttactttggcaaaaaagaaggggctgtggtaggtgccttagctggttttttaattgatttattgaaaggttatcccaattggatgttctttagtttattgattcatgggacgcaagggtatttagcgggtttaccaggtagaagacgtcttttaggtcttattagtgcaactcttgttatggtattaggttatgctatagctagtggattgatgtatggttggggagctgttctaccagatattcctggcaatattatgcaaaatatggttggtatggttgttggttttgctcttaataagtctctagaaagagtgaagaaatgatactagattataataagttaaagcaggaaactaaagctattgtagttgatattattgaacgtagcgctcttaaaaaaggtcaaatttttgtactaggtctatcatctagtgaggtttctggtggtttaattggaaaaaattctagttctgaaattggtgaaattatcgttgaagttatcctcaaagagttacattcacgcggcatctatttagcagttcaaggttgtgaacatgttaatagggcgttggttgttgaagcagaattggctgaacgtcaacagttggaagtcgttaatgttgttcctaatctacatgctggcggtagtggtcaggttgcagcttttaagttgatgacatcaccagttgaggttgaagaaattgtggcacatgctggaattgatattggagatacttctattggaatgcatatcaagagagtacaagttcccttgattccaattagtcgtgagttgggaggagcacacgttacagcactagctagtcgtcctaaattaattggcggtgctagagcaggatatacgagcgatccaatccgtaaattttaaaataaacctctgctctgcagaggtttattatttatctcaacgagagtggttattggagaaattgtacgttggtaagtcaataccttcttcaagaatagctttttgataaagtttgtaaaattcagcatagatgtcaaactgagcaccgttttgcgtgaagatattaatacgataaacaaattgaccattagcattggttgtaggaccaaaaacagtaggctctccaacgatagcagggtgttttgaaacatactcttcattgatttttgttacaatatcagaaatctgatcaaggtttgtatgaacaaataaaggaatatcaatttgagcacgcatattgctacgagacttattgctgacaattgtaatattacgattaggaatgaagtgcaaggttccatcgaaatcatgaatttgtgtggtgcgtatcccaacattagtaacagtgcctgatacagtaccaacattaataatatcaccaacatcaaattggttttctagcagaataaaaaagccattgacaacatctgataagaagccttgagcaccaagtccaatagcaaccccagcaataccagccccagctaataaactagaaattggaacgcccaatatacttaaaatccaatagaatagaaagaaataaagggtatagtttaaaacattgtgagaaagtttagctaatgttttttgacgagctactttttgtctagaaaaggcgagtgagcgattaacagtcttttcgaaaagataattgatgacttgcctaacgataacgaatgcaatgattaataataagattgatattagtttggtgaagaaagtaaataaaacttcctctacattaagatggtctataaatttttctaaagtaatcatagtaatagtctagtaaaaaaaaagccatagagcaagtattttaaaagcttatcgttaagcagtttaaagcttcttttttgcataaaaactttgtaaaacgttttaaattatggtaaactaaactgtatctaaataattttaaggagaaatgacttaatgtctacatcatttgaaaataaagctacaaaccgtggtattatcacatttacaattagtcaagatgagatcaagccagctcttgatcaagcattcaacaaagtaaaaaaagatttgaacgttccaggattccgtaaaggacatatgcctcgtacagttttcaaccaaaaatttggtgaagaagcactctacgaaaatgcattgaatttagtgttgccaaaggcttacgaagcagctgttgcagaacttggtttagacgttgttgctcaaccaaaaattgatgttgtatcaatggaaaaaggtcaagattggaagttgacagctgaagttgttacaaaaccagaagttaaacttggagattacaaagacctttcagtagaagttgatgcttcaaaagaagtttcagatgaagaagttgatgctaaagttgaacgtgagcgtaacaaccttgcagaattgactgttaaagatggtgaagcagcacaaggtgatacagttgttattgactttgtaggttcagttgatggtgttgaatttgatggtggtaaaggagataacttctcacttgaacttggttcaggtcaatttatcccaggatttgaagaacaattagtaggttctaaagctggtcaaactgtagacgttaatgtaacattcccagaagattatcaagcagaagatcttgctggtaaagatgctaaatttgttacaacaattcacgaagtaaaaactaaagaagttccagcacttgatgatgaacttgcaaaagatattgatgatgaagttgaaacacttgatgagttgaaagcgaaatatcgcaaagagctagaatcagcaaaagaaattgcatttgatgatgcagttgaaggtgcagcaatcgaattagctgttgccaatgcagaaattgttgaattaccagaagaaatggtccatgatgaagtacatcgtgctatgaatgagttcatgggtaatatgcaacgtcaaggaatttcaccagaaatgtacttccaattaacaggtacaactgaagaagaccttcataagcaataccaagcagatgctgacaaacgcgttaaaactaaccttgttatcgaagcaattgcagctgcagaaggctttgaagcaacagatgaagaaatcgaaaaagaaatcacagatcttgcttcagaatacaatatggaagctgaccaagtacgcggtctactttcagcagatatgcttaaacatgatattgcaatgaaaaaagcggttgacgttatcactagctcagctactgtaaaataattgcttattaaattttgaaaagattgggcttcccagtctttttatttgtgattattcttttgacgaatagctaaaaatagcgtaaaatagtaaatagcgaaaatttgaaaatatgacttatctattttctatctataaagaatattgctaaacaaaatgatagtcttacacaattaaggagaataactttggaattagaagtatttgctgggcaagaaaaaagtgaactttcgatgattgaagttgctcgcgctattttagagcaacgtggtcgtgataacgaaatgtacttcagcgatttggtaaatgatattcaaacctaccttggaaaatctgactcagcaatccgtgagtcattgccatttttctattcagatttgaatacagacggaagttttattccacttggcgaaaacaaatggggacttcgttcatggtatgctatcgatgaaattgacgaggaaatcatcactcttgaagaagatgaagatggcgctccaaaacgtaagaagaaacgtgtcaatgctttcatggatggtgatgaagatgctattgattacaatgatgatgatccagaagatgaagatttcacagaagaaacaccaagtttagaatatgatgaagaaaaccctgacgatgaaaaatcagaggtagaatcgtatgattctgagattaatgaaatcattcctgatgaagatttagatgaggatgtagaaatcaacgaagaagacgatgaagaggaagaagaggaagaagaggtttagacggggattttgtatttgacaaatagtcagatatagtttaaactattattcgggcacctcttatgaggtcagataaagctccctagtgatagggggctattttgtttttgggaaagatacagaatggttccagatagttttctgagtaggcccttgatcagatagtttctactagttttgactagagaagctggtattatttatcaatcatgtgttttgggttttacccgtaaactaactgttagattaacatttaatttaaggagtttttaatgacaaagtatatttttgttacaggtggtgtggtctcttctattggtaaggggattgttgcagcaagtcttgggcgcttactaaaaaaccgtgggctaaaggtgacaattcaaaaatttgatccatatattaatattgatccagggacaatgagcccttatcaacatggagaagtttatgttacagatgatggtgcagaaactgaccttgaccttggacactacgagcgttttattgatattaacttaaacaaatattcaaatgttacaacgggtaagatttatagtgaagttcttaaaaaagaacgccgtggagaataccttggtgcaactgttcaagttatcccacacgttacagatgctttgaaagaaaaaatcaaacgtgctgcgacaactacagattcagatgttattattactgaagttggcggtactgttggagatattgagagccttccgtttttagaagcacttcgtcaaatgaaggcagatgttggttctgataatgttatgtacattcatacaacgttattaccatacctaaaggctgccggcgaaatgaaaacaaaaccgactcaacattctgttaaagagttacgtggcctaggtatccaacctaatatgcttgttatccgtacagagcaaccagcaggtcaaagtattaagaataaattggcacaattttgtgatgttgcaccagaggctgttatagagtcccttgacgttgaccatatttatcaaattccacttaacatgcaagctcaaaatatggatcaaattgtttgtgatcacttgaagcttgagacacctgctgctgatatgacagaatggtcagcaatggttgataaagtaatgaaccttgagaaaaaagttaaaattgcattggttggtaaatatgttgaattacctgatgcctacctttcagttgtggaagcccttaagcactcagggtacgtcaacgatgttgctattgatctaaaatgggtaaatgctgctgaagtgacagaagataatattaaagaacttgtcggagatgcagatggtatcatcgttcctggtggatttggccaaagaggtagtgagggtaaaattgaagcaattcgctatgcacgtgaaaatgatgttccaatgcttggtgtttgtctcggaatgcagctaacttgtgtcgaatttgcgcgtaatgttttaaaccttcatggagctaattcagcagagcttgaccctaaaacaccgttcccaatcattgatatcatgcgtgatcaaatcgatattgaagatatgggtggtacacttcgccttggtctatatccatgtaaattgaaatcaggttcaagagctgcggcagcttataataatcaagaagttgtccaacgtcgtcaccgtcaccgttatgaatttaatacaaaattccgtgagcaatttgaggctgctggatttgtcttctcaggggtatcaccggataatcgtttgatggaagttgttgagttaccagagaaaaaattctttgttgcagcacaataccatccagaattacaatcacgtcctaaccatgctgaagagctttacacagcttttgtaaccgcagcagttgaaaatatgaaataactttatcgcctcccagtattaggaggcgattttatttttttagatagtttcactatcaaagtatcattagctcttttctttttctaaaaataaggtataataggttgcatgaaaaagattcgattatcaaagtttattaaaatgattgttgttattttgtttttaattagtgtagcagctagtttttattttttccacgttgcccaagttcgagatgataaatcctttatttcaaatggtcaacgtaagcctggaaactctttatatgcttatgataaatcctttgataagctattaaagcaaaaaatagaaatgacaaaccaaaatataaagcaagttgcttggtatgttcctgctgttaagaaaactcataagacagctgttgtcgttcatggttttgcgaatagcaaagagaatatgaaggcatatggttggctgtttcataagttaggatacaatgttcttatgcctgacaatattgcacatggtgaaagtcatgggcagttgataggctatggctggaacgaccgcgagaacattatcaaatggacagaaatgatagttgataagaatccatcaagccaaattactttatttggtgtttcaatgggtggagcaacagtcatgatggctagtggtgaaaaattacctagtcaggttgttaatatcattgaagattgcggttattctagtgtttgggatgaattaaaatttcaggctaaagagatgtatggtttaccagccttcccactcttatatgaagtttcaacaatttctaaaatcagagcaggtttttcgtatggacaagcaagtagtgtcgaacaattgaaaaagaataatttaccagccctctttattcatggtgataaggataattttgttccaacaagtatggtttatgacaactataaagctacagcaggtaagaaagagctttatattgtaaaaggggcaaaacatgcgaaatcttttgaaacagagccagaaaaatatgagaaacgtatctctagttttttgaaaaaatatgaaaaataatattgacaacaatatgataagttgatataatttattatgttgttaagcggggatggcggaattggcagacgcgcaagactaaggatcttgtgaccgcttttggtcgtgagggttcaagtccctctctccgcagactagtcgagttcatttggaactcgactttttgcatatttaagataaagatggagtatcacatgtcaaaagtacgtggctttgaattagttagccaatttagcaataaagagttattaccaaaacgagaaacagctcacgcagctggctatgatttaaaagtagctaaaaaaacggttattgaacctggtgaaattacattggtcccgaccggtattaaagcatacatgcaaccaggggaggtcctgtacctttatgatcgttcatcgaatccacgtaaaaaagggattgtcctaataaattcagttggtgttattgatggtgactactataataaccaagtcaatgaaggacatatttttgcacagatgcaaaatattactgatcaggctgttattttagaagaaggggaacggattgttcaggctgtttttgccccattcttattggcagatgacgatcaggctacaggaatgcgtacaggtggttttggtagtactggaaaataaaattattttacgaataatgttagaaaaggctagacttacttcttagccttttttgatgagagtaaacttatattttctctaacttggtgtgatataatgagtgtactagttatttggtaccaagctatcatattaatttagaagttataaaggaggcctgagtggctaagaaaaaatcagtcttcacctgtcaagagtgtggttaccaatcacctaagtatttgggacgttgtccaaattgctcagcctggtcttcatttgtagaagaggttgaagttcaagaagttaaaaatgcacgagttagtttgaacggtgaaaagtcccgaccgacgaagttaaaagatgtttcctcaattaactattctagaactaagactgatatggatgaatttaaccgtgttctaggaggcggtgttgtaccaggaagtttggttctgattggaggagaccctgggataggtaaatctactttattactacaagtatcaactcagctagctaataaaggtacagtattatatgtctcaggtgaggaatctgcagaacagattaagttacgaagtgagcgtctaggcgatatcgataatgaattttacctttatgccgagactaatatgcaaagtattcggtcggagattgagaagattaaaccagattttcttattattgattctatacaaactattatgagtcccgaagtatcaagtgtccaaggctctgttagccaagttcgcgaagtgaccgctgaattgatgcagttagctaaaactaataatattgctacttttattgtaggtcatgtgactaaggagggaacattagcaggccctcgaatgctagaacatatggtggatacggttctttattttgaaggggagcgtcatcacacgttccgtattttacgggcagtcaaaaaccgttttggttcgaccaatgaaataggtatctttgaaatgcagtcgggtggtctagttgaagttttgaatccaagtcaagtttttcttgaagaacgtttagacggtgcaacaggatctgctattgttgttactatggaaggaacaaggcctattttagcagaggttcaagctttagtgactccgactgtttttggaaatgctaagcgtacaacaacaggtcttgactttaatcgtgtcagtcttattatggcagttctagaaaaacgttgtggtttattgcttcaaaatcaagatgcctatttaaaatcagcgggtggtgttaaattggatgaaccagcaattgatttagctgttgctgtagctattgcttccagttacaaagaaaaacccacaaatccacaagaatcatttattggagaaattggactcactggtgagattcgtcgcgtgacacgtattgagcaacgtattaatgaggctagtaaattgggctttactaaaatttacgcaccaaagaattctctagctgggattgaaatacctaaaggcattgatgttattggtgtgacaactgttagtcaggtcttaaaagcagtgttttcaacataatgattagattcggttcagccgaatcttttttggtggcgagaaacatttcgtgaaaaataatgggcaaaatgataatataaaagggttggtatttagtaaatatcgaatgatgttacactaacaaaggagatctctatgaccacttattttgataactttttaaaaaccaatcaagcctatgctgacttacatggaacagctcatctacctatcaagccaaagacaaaggttgctattgtaacctgtatggattctcgtttacacgttgctcaagctctagggctagctttaggagatgctcatattttacgtaatgctggtggacgagttacagacgatgttctacgttctttagttatttcgcaacaacaattaggaacacgagaaatcgttgttctacaccatacagattgtggagcacagacgtttactaacgaagcttttgctgctcaattacagagagatttgggtgttgatatgcatggacatgattttcttccttttaatgatattgaagaaagcgttcgtgaagatgtggcaaaattacatgcttctccattaatcccagatgatgttgttatttctggtgctatttatgatgtagatactggtcgtatggtggaagttaaatagaaaaaatcctgtccttagcgatgggtttttttattttagaaaactagatttaaaggcaacagttaggcttatcatgccttatgctggaattcagacagaggaaacatcttttgctatactgaaactatactataaaagcggaggaaatttaaaatgaaaaaatatgatgtcattgttcttggttttggtaaagcaggtaaaacattagcagcaaaattagcaacacaaggtaaaagcgttgcaatggtcgaagaagacgataaaatgtacgggggaacatgtatcaacattggatgtattccgacaaaaacgcttttagtatcagctagcaaaaatcatgattttcaagaagctatgactactagaaatgaagttacaagtcgtttacgtgctaaaaattttgctatgttggataataaagacactgtggatgtttataatgctaaagcccgctttatatcaaataaagtggtcgaattaacaggaggagctgacaaacaagaacttacagctgatgttattattatcaatactggtgctaagtcagtacaattaccaatcccaggattagctgattctcaacatgtttatgattcaacggcaatccaagaattggctcatcttcctaaacggttaggtatcattggaggcggtaatattgggcttgaatttgcgactttatattccgaattagggagcaaagtgacagttattgatagtcaatcccgtatctttgcgcgtgaggaagaggaattatcagagatggctcaagattatttagaagagatggggatatcttttaaattatcagccgatatcaaatctgtgcaaaatgaagatgaagacgttgttattagctttgaggatgaaaaattaagctttgatgcagtattatatgcaacaggacgtaagccaaatacagaaggtttagcacttgaaaatacagatattaaattgacagaacgtggagctattgctgttgatgaatattgccaaacttctgttgagaatatttttgcagttggtgatgttaatggcggccctcaattcacatatatttctttagatgactcacgtattgtcttaaattatttgaattgtgataaggattattctctaaaaaatcgaggagcagtaccgacttcaacctttacaaatcctcctttagcaacggtaggtctagatgaaaagaccgctaaggaaaaaggatatcaagttaaatctaatagccttcttgtttctgccatgccacgtgcacatgttaataatgaccttagaggtatttttaaagttgtggtagatactgagacaaatcttattttgggagctcgcttatttggtgcagaatcccatgaattaattaatatcatcacaatggcaatggataataaaatcccatatacttatttccaaaaacaaattttcactcacccaacaatggtagagaattttaatgatttgtttaacttttaagaatatttttaaaaagtaaggcaattttgctttactttttttatcgaaaattagtgtggctattattactgattatcatttttagtgatttagtggtataatagagttgattggcaatcatctgtaagagtttgaatgatgttttgcccccttgactaattcagttaaactgaaaaagtttactatcagaaaatataggagtagaattttggctaataagattcgtgtgcgttatgcaccaagtccaacaggattgttacacatcggaaatgcgcgtactgcgctctttaactacctttatgctcgccatcatggtggggattttgttattcgtattgaagatactgaccgaaaacgccacgtcgaagatggtgaacgctctcaattggagaacttacgttggctaggtatggactgggatgaaagtcctgaaacacatgaaaattatcgtcaatcagaacgccttgagctctaccaacgttatattgatcagttgttagcagaaggtaaagcctacaagtcctatgtgactgaggaagaattagcagcagagcgtgaacgccaagaattggcaggcgaaacacctcgctatatcaacgaatttatcggaatgtcagaaactgaaaaagaagcttacattgcagagcgtgaagcagcaggcatcattccgacagtacgccttgctgttaatgaatctgggatttataaatggactgatatggtaaaaggtgacattgagtttgaaggctctaatatcggcggagactgggttattcagaagaaagatggttatccaacttacaatttcgcagtagtcattgatgatcatgacatgcaaatttcgcatgttatccgtggcgatgaccatattgcaaatacgccaaaacaattaatggtttatgaagcactcggttgggaagcgccacaatttggtcacatgacattgattataaactcagagactggtaagaaattatcaaaacgcgacaccaatactcttcaatttatcgaagactatcgtaaaaaaggttatatgtcggaagctgtctttaatttcattgcccttcttggctggaatcctggtggagaagaagaaatcttctcacgcgagcaattaattaatctatttgatgaaaatcgtcttagcaaatcaccagcagcattcgatcagaagaaaatggattggatgagtaatgattacctaaaaaatgctgattttgagagtgtttttgcactttgcaaaccattcttagaagaagctggtcgacttacagacaaagctgaaaaattagttgagctttatcaacctcaattaaaatcagctgatgagattgtaccattaacagaccttttctttgcagattttccagaactaacagaagccgaaaaagaagtaatggcagctgaaacagtcccaacagtcttatctgcttttaaggaaaagttagtatcgctttctgacgaagaattcactagagatactattttccctcaaattaaggctgttcaaaaagaaacaggtattaaaggtaagaacctatttatgcctattcgtattgcggtttctggtgaaatgcatggaccagagttaccagatactatttatttattaggtaaagaaaaatcagttcaacatatcgataatatgttagcaaaattataatataaaaagtcgtgaattttcacgactttttgtgtacttttaccaattgtatttttcaacattgtctttggtaacaaggtaaattggagaaattgtttctttctctacttttttgcctttataataatcaattgctgcttgaattgctatttctcccatcttagctggttgttgtgcaatagtggctgaaatatctccttttttaatggcatcatgggcatctggctgaccatcaattcctacgataagaacattttgcaagccagcagatttgacagcctgtgcagccccaagtgccatttcatcattttgtgcgaaaataatttggacatctttatgtccttgaatcatattttgtgtagtattcaaagctttggcgcggtcaaaattggcagattggcttgaaaggatgtcaagtttagattttgcaactgaatgaaatcctttaccacggtctacagtagcagaggcacctggtactccagataattcaaaggcttttgcttttttgcctagttttttaacggcataatccgcagccatcttaccagcagcaacgttatctgaagcgacagtagttaatactttgcctccctcactaccacggtccattagaataacaggaatattagcgttgtttgcagacttaatagctgttacaatagcttttgagtcaacgggattaatcaaaatagcatctacgttttgactaataaagttttggacatcatctgcttgacgtgcggcgtcatcttgagcatcagctaccttaatgcttatttttttattgctagcatatttgtcaataccgtctttcatcgcaacaaagtagggattgttagttgttgaaatagatacacctagtttcaaatctttagcagattttttggttacattttttgtagaattcccagaagaatttccaagtccagttttaccacatgcacctagaatgaggacaatagacatcaataaggctagaaagccaagtttttttccaaatttcatttgaaactcctttagataaaatataatgaacttatagaaattagagtaaagactattttgctactttaaagcgatcaagtaaaacagccattaaaataacgatacctttcacaacttgttgccaaaatgcagagacaccaatgatgtttaatccattgttcaggacaccaataataagagcaccaatcaatgttccaatgatacgtcctttcccaccagataaagacgttccacctaagacaacggcggcaatagcatccatctcataacttgctccagctgttggttgtgctgagctaaggcgtgatgtgataattaacccagaaatggaagccatgatacctgagatagtgtagatgataattttaactttgtttaacttaatacccgagatatacgctgctttttcattacctcctaaagcgtaaacagatttcccgaaggctgttttatgtaacaaaatatacaaaataataaaagtaagaaacatgagaatgactgggaatgggataccaacaatatagccttgtcccaaaaattggaatagaaaactatcggataagccagcggtaattgggttgccgtttgaataaactagcgttgctcctctaaagatagtcattgttgccagtgtaacgataaatggtgctaattttccgtaagaaatgaagagtccgtttagcattcccaagatgccacctaaggcaacagataaaacgatagcaataccaacgggtactccgtggccgattaatccagctgttaatgcactagatagggctaatatggacccgactgataaatcaataccgccagtcaaaataacgaaggtcatcccgaaagcgataaaaccatttgcagttacttgtaataataaattgagtagattattggttgtgaggaaattaggattaatgagtgtgataataaccattaaaccagctaacgcaatcagggttgttaactctgatatatatttcatcatatttttcactttacttacctcctgtggctagttgcataactttttcttggtcagcttcttttcgactgagttctccactgattcgaccttcgtgcattaccatgatgcggtcactaacacctagaatttcaggtaagtctgatgataccatgacaattggaacacctctgtctgctagttcattcattaattggtaaatctctcgtttagcaccgacatcaacaccacgcgttggctcatcaagaattaagactttaggagcaataccaatccatttagcgagaacgaccttttgttggttacctccagaaagatttccaacctctaaatctggtctccctgatttaatgtagagacgattaatcaattgttgcacaaatgttgtgcttgttttttcatcaaagaaaccatgtttgctaaaatctttagtgctagggagagtcatattgtccttgatattgaagtctaggatgagaccttcatcttttctattttcggtcaaaaaaccaatgccctgcttgatagcttggcttggggtagtaatagtgatttcttggtcatcaattttcaccttaccagacttctttttatcaattccaaagatagttcgcataacttcagtacgcccagctcccattaatccagaaaatccaagaatctcgcctttacggacataaaaggaaacgtcctcgaaattatctccacagaggttactaacttcaaaagcaacaggcccaatttcagaatgtttttcaggatagtaatcttccaattttcggccaaccatttttttaaccaattcgtcagaatttgtgagtgatgtttcttttgtatctacaatgacaccatctctcatgacggttacgaagtcagtgattttaaaaatttcctccattcgatgggagatatagacaacgcccactccttcttgtttcaaacctcggataactcggaaaagattttcagtttcacgatctgttaaagcagcagtcggttcatccattaccaaaatagagagttggtttaggagacttttggcgatttcaatcatttgttgttgtccaacagacaagttaccaatcgggatgtctaggggaatagtcacacctaatcttttaaaagtttcaagtgctttttgtctcattaatttttgattgagtaagccaaaagttgtcttgatttcacgtccaagaaagagattttccaagacagtcatttccggccaagtattcatctcttggtgaataaaactaataccaaattcctctgcttcttgagggtttgaaaaagttcgttcctcgccatcaatataaatagttcctgtacttgctggaaaaagtcctgttagaatgttcattaaggttgatttacccgcaccattttcacccataagcgcgtgtatttgaccagattgtaattccaaatcaatcttttctagaactttattagtaccgaaggatttggagatattcctcatgtcaattttcatggactaaactcctttctagatgataacaccagattgtagaataatatttgaatacggtgtattttcacctgtacgaataactgctttgacatcttgggtcatttgttttaaatgattgtgactgacgtactctatgctaacagagttatcaagtttagctaataaccttgataattgatccggatttgcttccttgatttcttctgctaaaatgactttttcaactaagatattctctaaatagatatcaagtacctcttggaaactaggtattccagaggtcaaagacaaatcaatctttggaatgccatttggaacaggtagacccagatctccaatacaaactcgatcagtatgcccaaggtcgtctgctaatttagcgagatgactatttaatataccagtctttttcataatgttggttgtcctccatttctttaattgtaggcatgccaccctgtgcaccaaatttttgcacggataagtgagcagctagagttgcaaaacgtaaggccttagcaatcttaaattttttcgagatagcataaccgaatgcaccgttaaaagtatcacctgcaccagttgtatcaacagctttagtttctaaagcaggaattaaatgactttcttttccatcagagtagatggctccttttgtgccgagtgttacgattagtttttcaggatatgtggctaatatatcctctagtttttggtttgggaacagctcttgacattcgtgttcatttggtgtgaaataatcgaccttatcgagcatctcaatatcagtctctctagatggtgcaggattatagagtaatttaatactatgttctttacaaaaattagcaattttcatatttgcttgatgaggaatttcattttgtaatacaactaaatcagcttctttaattattgaccactcctgagaccattttttagtatcaacttttccgttggctccaggacagtaaatgattcgattatcattattataaagagtgatttgggcaacacctgaagaagatggtatcgttcccacaaaatccgtagtaacatgatttttgtttaaattatccaaaagaatgggaccaaaagaatcctcgccaatggcaccaagaatagtaatattatctcgctcttggctaagacgcccaatagcgacagcctgattagcacctttacctcctggaaccattgaaaaacgttggccaaatacggtttctccctctttggcgatacgattggtttccataactaagtccatggaaatactaccgataatgacaatgttactcatctattttcctccttagggtttcacgttcgacataatgaacgggtaatttaatacgcttattggtaataggtaattgattagtaattttgaaaattaattcagctgctttttgtcccataatatatgatgattggtgaatagttgacaacgaagggtagataaattggctcattaaaatatcatcataaccaataatttgtacatcttcagggattcgcttccctcgattaagaatctcgtgtaggtaggcaatagcatgtatatcagatggagcgataatgctatcaatgtctggatggtggtcaagtaaagttttcgcttcaatttgaatctctgcaaaatcaaaactggcactatcttcgatagcaaaacaagcccctttgtttaataggtaattttggcttccttgaaacctttgattaaggttatcagctttatctagcggaccacgaatgagtaatatattggtagcacctgctgtccaaatagcttgagctgctaattttcctccctctttattatcagagaaaacgccgtactgtgtttcttgattaacgcggtcaacaactacaactggaatatctatttcaggatgatttttggtgaaatcgtgtgttgtaataatccctgcagcattactttgtaatagcacatttaagtactcttcttctaaatggctcttgttatttgtgttgccaagcatgacacgataaccctgttcttttagaaattcttcaactcctctagcaagtcttggaaagaaagggtttgaaatatcgggaagtagtaatccaacaagttgattttttttggttttcagagattgtgcaaggaaatttggaacataatggagttcgcggatagcttgctcgattttttgacttgctttttgactaacgtaaccattttgggatatataccttgagacagtagatgttgatacgccagctttctcggcgacttgtctaatcgtactcatagaaactcctttcttatattgtggaaacggtttcacaattagaattgtaatcgcttactaaaaaattgtcaagctattttttaaataatttaatgataaaatatcattatttttagaggtcatattcaagtcataaagctgtgatactatgttcacatcaaaagatcaaaggagaaaaaccatgtcacatgcttggaaagaattaaccttttataagaaaaaatacctcctgattgaattgctaatcattgttatgatgttcatggtagtttttttatcaggtttagcaaacggtttaggtagagctgttagtgctgctattgaaaataacccagctcaaacctatattttgaatgaaggtgctgaacaagtgattacatcatctgtattgacaactaaagatcagacagatttaaacagtttgaatttaaaagatagtaccactttaaatattcaacgttcgagtttaactcgacaaggacacgaaaagaaaattgatatttcttattttgctattgataaagattcttttatggcacctacactttctgagggaaaacaactgacaagttacaaaaaagctattattttaaatgatagtttaaaagctgaagggataaagttaggtgataaagtgattgataagtcatcatctatatcactaacagtcgttggatttgtccataatagtatgtatggtcacggacctgtggcatttattgataaagacatttataccgaaattaataaaaagattaatcctcaataccagttcttacctcaggcattagttatgaaaaatgataaaagtatatctcatttaccaactcaattagaagctgttagtaaaaaagatgtcattcaacatattcctggttatagtgccgaacaatccactttgaatatgattttatgggtccttgtcgtagcttcagctggtattttaggtgtctttttctacatcatcacacttcaaaaacgtcatgaatttagcgtcatgaaagctattgggacaaaaatgtcagagattgccctatttcaattgagtcaagtcattatattggcactgtttggtatcattgttggagatggattggcggttgctctctcttatgtattaccagctcaaatgccatttgttattaattggcaaaatattattctagtatcgtttgtatttttagtcattgcaatgattagtagtgctttgtcaattgtaaaagttgctaaaatcgacccagtcgaagttattaatgggggaggagaataatgtcagcaatcttagaattaaaacacatctcaaagcactatccagatggagatgagcttttatcaatattagataatttagatttatcagtttctgcaggtgagtttgtagctatactgggaccctcaggttcaggtaaaagcacacttttatccattgcagggttacttcttggcgcagatcaaggtagtttgtatgtcaatcatgagaacgttacggatttgtctcaaagacaaagaacacaattgcgccgtgaagcactaggttttatatttcaaagtcatcaactgcttccttatttaacaatccaagaacagttgcaacaagaggctcgatttgcaaaacactatgataagaaaacaagcttggaagaaattaataaattattatcagatttaggaatagagcagtgtgcacataaataccctaaccaattatcgggaggacaaaagcaacgcgcagcaattgctagagcatttattaatcatcctaaggttatcttggcagatgagccaacagctagccttgatgaagaacgtgggcgtcaagttacagaacttattcgtcaggaagttaaatcacataatactgcagctattatggtgacacacgatgagcgcgttctagatttagtagataccgtttatcgtttaaaggacgggaaattagttaaagaaaacttctaacttgtgttacaataagctagaggtgatttaatgattaaaatattagttgtagaggataacattgttcaacaaaaaatcattaccacaaaattaacacaagagggctaccaatttatcactgcttcaaatggacaagaagctctaaattgtctagatacagaagaagtacaattgattataactgatatcatgatgcccatgatggatggttatcaattaattcaagaactcaggtcagctgcttataatgttccaatcattgttatgacagcaaaatcacaaatggaagatatgacaaaagggtttggccttggtgcagatgattatatggttaagcctgtgcagttacaagaattagctttacgtattaaggcactcttgaggagagctaatattgtagctcaacatcagctaattattgggaatacttgtcttaatgaagatgaattaagcttgaaatattttgagcaagaaattatatttcctcagaaagaatttagggttcttttccacttacttagctatcctaataggattttcacacgtttagaactattggatagtatttggggaatggatactgatttagatgagcgggtggtagatgcttgcatcaataaaattagacgaaaagtagaacacttaccagattttaagattgagacggtgagaggggtagggtatcgtgcaaaaaatgactaagctaaggcgatttcggtttccgttaagattttatttcacattaatgtttgtgttaacgatgcttttctcagtcctagcttctcttttactagttgcagcaatagtttttactttttttcaaggagtcttaactactcatgtattacaagttagtgctctcgctgttgtttttttaagccttgtgatagctagtattagtatgtggtacggttcttatcatttaacaaaaccaattttagatattagccatattgtgtccaatgttgcagacggtgactttgaagggcatatttatcgaaacagtaatcgtcgtaaatcctatgagtattataatgaattggatgagctatctgaaagtattaatcagatgattgtttctttatctcatatggatcatatgcgaaaagactttatcactaatgtttctcatgagctaaagactccgattgctgcagtagctaatattgtagaactattacaagatccagaattagatgaagaaacacaaagtgagttattaggtcttgttaaaacagagagcctaaggttaacaagattatgtgatacgatgttgcaaatgtcgcgcgtggataatcaggagactattggggagctatcctctgttcgtgtagatgaacaaattcgtcaagcaatgattagtttaacagaacgttggcaagctaaaaggataaattttcaactggattcaaaaccatatactgtttactcaaactctgacttgctgatgcaagtttggataaaccttttagataatgcaataaaatattccgaggatattgtagacttaagtgtacgaatggaagaaactaataatcattatctgagagttattatttctgataaaggtaggggaatttctcaatatgatgttcagcatatatttgataaattttaccaagcggatcagtcgcataatcaacaaggaaatggattaggactagcaatagttaaacgtataattgttctttgtaagggacgtattagtgtctccagtcagttggaaattggaacagaattttgtgtagaactacctttatcataattatttaaaacaataactgccaattggcagttattgttttatttgtttagaaataaatatactaaaaatagacaaaaactataaaaatatttgacaataaatatagcaagtgtataatattacaaaacataggaatttggaaggggattttttatgggaaaagaaaaattaattttagcttattctggtggtttagatacctctgttgctatagcttggttaaaaaaagattatgacgttattgctgtctgtatggatgttggcgaaggtaaagatcttgattttattcacgataaggctttaacaataggtgccatagaatcttatattttagatgttaaagatgagttcgctgagcattttgttttaccagctttacaggcacatgcgatgtatgaacaaaaatacccgcttgtttcagcgcttagtcgtccaattattgcccaaaaattagttgaaatggcacatcaaacaggtgcgaccacaattgcacatggctgtacaggtaaaggaaatgaccaagtgcgttttgaagttgcaattgcagcactagatcctgaattaaaagtaattgcccctgttcgtgagtggaagtggcatcgtgaagaggaaattacttttgcaaaagctaacggcgtacctattccagcagatttagataacccttattctatagaccaaaatttatggggacgtgccaatgaatgtggtgtgcttgagaatccttggaatcaagcgccagaagaagcttttggtattacaaaatcaccagaagaagctcctgattgtgcagaatatattgatattacgttccaaaatgggaagcctatagctataaacaatcaagaaatgacactagcagatttgattttatcgctaaatgaaattgcaggaaaacatggtattggacgcattgatcatgttgaaaatcgtttagtcggtatcaaatcacgtgaaatttatgaatgtcctgcggcaatggtactgttagctgctcataaagaaattgaagatttaacactagttcgtgaagtgtctcattttaaacctatccttgaaaatgaactatcaaatcttatttataatgctttatggtttagtccagctacaaaagctatcattgcctatgtcaaagaaacacaaaaagtggttaatggtactacaaaagttaagttatataaaggttctgcccaagtcgttgctcgccactcatctaattcattatatgatgagaatttagcaacctatacagctgctgatagctttgatcaagatgcagcagttggttttatcaaactctggggacttccaacccaagttaatgcccaagtaaacaaaggataaataaaggaagataagaggatgacaaaaaatcataagttatggggtggtcgttttgaaagtagtcttgaaaaatgggttgaagagttcggtgcatcaatcagtttcgaccaaaaattagctccctatgatatgaaggcttctatggcccatgtcacaatgttaggcaaaacggatattattagtcaagaagaagcaggcttgataaaagatggtttaaaaatactgcaagataaatacagagcaggtcaattgacttttagcatatcaaatgaagacattcatatgaacatagagagcttattaaccgctgaaattggagaagtagcaggtaagcttcatactgcacgttcacgaaatgatcaagtggctacagatatgcacctttatttgaaagataaattgcaagaaatgatgaagaaattgcttcatttacgaacaaccttagttaatttagcagaaaatcatatctatactgttatgccagggtatacacatttacaacatgctcagccgatttcatttggacatcatctaatggcttactataatatgtttacgcgtgatacagagcgattagagtttaatatgaaacacaccaatctatcaccattaggagctgctgctctagcagggacaacgtttcctattgaccgccatatgacaactcgtttattagattttgaaaaaccatatagtaattcgcttgatgctgtctcagatcgtgactttatcatagaatttttatccaatgctagcattttaatgatgcatttatcacgtttttgtgaagaaatcattaattggtgcagttatgaatatcaattcatcacattatcagatactttctctacaggatcatctattatgcctcaaaagaaaaatcctgatatggcagaattaattcgagggaagacaggccgtgtttatggaaatttatttagtttactaactgttatgaaatcattgccgttagcttataacaaagatttacaagaagataaagaagggatgtttgatagcgtagaaacagtcagcatagctattgaaatcatggctaatatgcttgagacaatgactgtgaatgagcacataatgatgacctcaacggagactgatttttcaaatgcaacagaattagcagattatttagcaagtaagggggtacctttcagaaaagcacatgaaattgtaggtaaattggttttagaatgcagtaaaaatggttcttatttacaggatatacctttaaaatattatcaagaaatttcagagttgatagaaaacgatatctatgagatattaactgcaaagacagcagttaaacgaagaaattcattaggaggaacggggtttgaccaggttaaaaaacagatcctattggcacgtaaagaattgaaagcggaatgactgctttctgaaaaaaccctcgtttaactctgttaagtttctcacgtattttcagtaaaaaactagcattttttatagaattgtgctagaattaacgtgtaagtgggcaacgcccaaaaaataaataggaggcctgaataatggcaatcgtttcagcagaaaaattcgtccaagcagctcgtgataacggctatgcagtaggtggatttaacacaaacaaccttgagtggactcaagctatcttgcgcgcagcagaagctaaaaaagctccagtacttatccaaacttcaatgggtgcggctaaatacatgggtggttacaaactttgtaaacaacttattgaaactttggttgaatcaatgggtattactgtaccagttgctatccaccttgaccacggtcattacgatgatgcccttgagtgtattgaagtaggttacacttcaattatgtttgatggttcacaccttccagttgaagaaaaccttgaaaaagcacgcgaagttgttgctaaagcacatgctaaaggtatttcagtagaagctgaagttggtactatcggtggtgaagaagatggtattgtcggtaaaggtgaattagcaccaatcgaagacgctaaagctatggttgaaactggtattgacttcttggctgcaggtatcggtaacattcatggaccatacccagcaaactgggaaggacttgaccttgatcacttgaagaaattgactgaagctgttcctggtttcccaatcgtgttacacggtggttcaggtattcctgatgatcaaatccaagaagctatcaaacttggtgttgctaaagttaacgttaacacagaatgtcaattagctttctgtcaagcaactcgtgactacgctgttgaattcaacgctaacgaagctgaatacatgaagaaaaaactctttgacccacgtaaattcttgaaacctggtttcgatgcaattacagaagcagttgaagaacgtattgacgtgtttggttcagcaaacaaagcataattaacataaacagataatagttaaaagctcacttatggtgagctttttttggattatatgactttttattaaatagatactctttaaagattgatatgcttaagataatttcgaataaatgccgctgaatctgtgagttgttgctcttcttttgggcttagtgaaagagaaattctttctacaattcctactctaccaataatagctggatatccaaggtaaaccccttcggactcatagaaggtagatacaggtagtaactcatgggaatcatttaacacagttaaaacgatgcggacagctgcggtagcgataccataactagtatattttttaccaaaaaagacagtgtgcccgccttttaaagaagcttcttttatctgttctaattcttctgcttttaatagtgatatagctggttgtccttttacagttacctgactccaagcgacaaattgggagttaccatgctctcctagattataaccaccgatactccttggatcaacttgtaggcgttgaccaagcactcttttcatccgagcagtatccaataaggttcctgttccgataacgcgtgatttaggaaattgagtatattcttgataaagctgggtaatggcatcaacaggattagtaacgacaataaggatccctctaaaaccagatgattttaacttttggctaacgtcgtagacttctttactggtaaatggtagttcagcaaagcgattagcttctttgttattctgtagtgaaatatcacctaaggctgaaatcacaacatcagcatctgacaacgcgtcatagtcgtttaatactagattagcgtgataagtagcatttgccagagcatcttgaaaatcaatcatatcagcattaaccttatcaacattagtatcaataaagacataatcatcaccaataccttgtgcaataagagcgtgtgcaacagttgatccaacgtgccccatgcctataattccaattttacgtgtcatatgaaacctcctttgattattgttgtctattataatattttgaaagaaaatgtaaactaaaaaatgaattagaaggaagtgtgtcttattataaaaaatatgtaagcgatttagataaaacaaatgaaaaagtaattttgaaaagaacttgctagaagaagtaagttgtgatagaatagtctagtatgtggtgctagcacatccgtaaatattgatcaatataggaggaactcgtaaaatggctaaagtatgttatttcacaggacgtaaaacagtttctggtaacaaccgttcacacgcgatgaaccaaacaaaacgtactgttaaaccaaaccttcaaaaagttactgttcttatcgacggtaaaccaaaaaaagtttgggtttcagctcgtgcgcttaaatctggtaaagtagaacgcgtttaataaactgagaaagccttagggctttttttagtgtttctaaggctgatttgatagttagatgcctctatttttttacaataatagtgagatatgatagaatagagtgataaaaactttttgaggtagtagatatgactgtaaaaatcaatacaagagatggtcaaattgaactctctgatgacgttattgcaactgtcgttggaggttcagcaacggaaatttttggcgttgttggtatggcaagtaaaagtgctatcaaagataactttcaagcacttttgcgtaaggaaaactacgcaaaaggtgttgttgtgaggtctagtgaagcgggcatcgtagtagatgtttatactgtcatgagttacggcgtcaaaattagtgaagtttcaaaaaatattcaagagcgagtgaaattcaatctcgaaaatcagcttggtttatctgctgatatggtgaatgtttatgtgcaaagtattaaggttgtaggagaagattagtgtcaaagattacgacaagtttattccaagaaatggtacaagctgccagtacacgtctgagtaaacaggcagagtatgtcaactcattaaatgtattcccagttccagatggtgatactggtacgaatatggggatgactatggaaaacggagccaaggaagtttcggacaaaccagcgacgactgttggagaagttggtcaaattctttctaaaggtgtattgatgggagcacgtggaaattcaggtgtaattacatcacaattattccgtggttttggtcaaagtatcaaggataaagaagaattaacgggtcaagatttggcacacgctttccagaatggtgttgaagtagcttataaagccgttatgaaaccagttgaaggaactatcttgacagtatcacgcggtgcagctaccgctgctctaaaaaaagctgaagaaactgatgatgcagttgaagttatgcgcgcaactctcaaaggtgctaagcgtgctcttgctaaaacaccggatatgctacctgttcttaaagaggttggtgttgttgattctggtggtcaaggactcgtctttatttacgaaggtttcctctcagcactgactggggaatatatcgcatcagaagattttaaagcaactcccgcaacaatgactgaaatggttaatgcagagcaccataaagctgtagtaggccacgtagccacagaagatattaaatatggctattgtacagaagtcatggttggtttaaagcaaggaccaacttacgttaaggaatttaactacgaagaatttcaaggttatcttagcaatctaggggattctttactagttgttaatgatgatgaaattgtcaaggttcatgttcatacagaagatccaggtcttgttatgcaagaaggtttgaaatatggatcgcttgtgaaggttaaagttgaaaacatgcgtaaccaacatgatgcccaaatgcaaaaggttgaagttgaagaaactgtcaaagaaactaaagaatatggtattattgctgttgtagctggtgacggtctagctgagatttttaaatcacaaggtgttgattatatcatctctggcggccagactatgaacccatctacagaagatattgtaaaagcgattgaaaaagtaaacgctagaaatgttattattttaccaaacaataagaacatcttcatggctgcacagtcagctgcagatgtcgttgatattccagcagcagtagtagagacacgtacagttccacaaggatttactagcttacttgcttttgatcctgctaagtctcttgaaactaatgtagctgatatgacaaatagcctctcagatgtcattagtggtagtgtgactttagctgttcgtgatacaacgatagatggccttgaaattcatgaaaacgacatccttgggatggttgatggtaaaattctagtatctacaccagatatggaaaaagcacttaaagacacttttgataaaatgattgatgaagatagtgaaatcgtgacaatctatgttggtgaagatggtaagcaagcattagctgagaccttgtcggaatatcttgaggaaacttatgaagatgttgaagttgagatccaccaaggagatcaacctgtatatccatacctcatgagcgttgaataattgataaaataaaaaattaggagagatacttctaattttttattttatcagagtttctattttagtatgataaagcatcagtattttgaaaattttgacaaattgtgttagaattgttttaaaacattcatacaaaggagatttatgatgtcattaattattcttacggttattttggttttagtgattgttctgttgataacttctttatacgttgttaaacaacagacagtagccatcattgaacgctttggtaaatatcaaaagactgctactagcggtattcatattcgtgtaccattgggtatcgataagattgcagcacgagtgcagttacgtcttttacagagtgaaattatcgttgagacaaaaacaaaagataatgtttttgtcactttaaatattgctacacaatatcgtgtcaatgaaaataacgttacagacgcttattacaaattaataaagccagaagctcagattaaatcttatatcgaagatgctttgcgttcatcagtacctaaacttacattagacgagctatttgaaaagaaagatgaaatagccttggaagttcaacatcaagtggcagaagaaatgtcaacatacggctacatcattgttaagactttaattactaaggttgagccagatgcagaagtaaaacaatccatgaacgaaatcaatgctgcacaacgtaaacgtgtagcagctcaagaattagcgaatgctgataagatcaaaattgtaactgctgcagaagcagaagcagaaaaagatcgtctacatggtgtgggtattgcgcaacaacgtaaagcaattgtagatgggttagctgattcgattcaagaattgaaagatgctaacgtgacattgacagaagaacaaatcatgtctatcttgttaacaaatcaatatttagatactttaaatacatttgctattaatggtaatcaaacgattttcttaccaaataacccagaaggtgttgaagatattcgtacacaagttttatctgctcttaaaacaagataatgaactttttatagaagcaaaataaccagagcatttgctctggttattttgtgtctgacttatttattataattggagagacggaaaaaagttattttttaccgtaacgtttgtactcatgaatgattttcagagcacgttttctagttttaatgttaggacttttaagtctgcgataggctgacgataggtctgttttttcagccatgattacctcctatagacaatttattaacgttaacagacaccagtataccacaaaaaaattaactggtaaagtactttgttgataaatttaaaaataaatagcaaagtaattaaatatcaatcaaaagtaataagttcaaagatatattaaacctttattaatgaggtttggatttgacaagtgatgttaagtgaaagatgaatgaggaaaatacccaacgagaaagtagctaatggctatcattgtgcatataaaaaaacgatcgatgagtgatcgtttttcagcaaactaaataattatttttaatgtaattgaatgaaaatttatacttgtgaaagtgtatcggttaagttaataaggtcagtttttatttatcgtaagcacttaggaagtgttttggagcatacccacgagagtagataaatccggcatcgcgtgaaggatagcttgattcagaaggcgcatacccacgagagtagataaacccggcatcgcgtgaaggatagcttgattcagaaggcgcatacccacgagagtagacaaatccggcatcacgtgaaggataagacactgtgtctgccttcgcaagacttgctaaagtagctaataatagagtgacagctgaagctgctgttaaaacactgattttaagtttcattataaaatcctttcaaagataataaactattcttgcacagtggttagttcattttgtgcatactatattatatcatcaaaagctcattcgaacaacatgtttttaattttaaacaaatatatgattaatcaaatatcgcttaaaattaaaaaatgagatttagtaacttatttaatagtatacaatccaataacgactgtctaatttaatctatagttgaagctagtcgtggatttcactaaagatgtagcaataaaaaatcccctccagttccattgcaatgatgacaatgacaaaacctgtaggggtataaatagtctatatttaaatgtgaataaattttattttaagaagcgttgtagaaattccttagttctttcttgtgttggattttcgaaaagttgtttaggagtaccctgctctgcaatgattcctttgtccatgaaaataacgcggtctgatacttctttagcaaattccatctcgtgtgtcacaattatcattgttaatccagatttagctagatcttgcattgttttaaggacctcaccaaccatttctggatccaaggctgaagttggttcatcaaaaagtatagcttctgggttaacagaaagtgctcgggcgattgcgacacgttgcttttgcccacctgataattgttttggtttagctttccaatattgctcagtcatgccaacagcatttaagttttctttagcaatcttttcagcttcttggcgttcacgttttagaacagtagtctgtgcgacaatagcattctctaagatatttaaattttcaaagaggttaaaagattgaaagaccatcccaagtttttcacgataattatttaaatcatagcctttttcaagaacattgtgaccgtgatataagatttctcctccacttggttcttctaagaggttaatagaacgtaggaaagttgattttcctgatccagaagaaccaatgatagaaataacttcgcctttgttgaccgaaagcgaaatatcttttaacacttcattgcttccgtaagattttttcaaatgtttaatttctaaaatagcttgtgtcataccaacctcctagacttgtaattgattcgcaccggttgtgtaattatctgaatcaaaacgtttttcaatgtaacgtaagatacgtgttacggtgaaggttaagatgaagtaaataatcgcaataatggtgaatgtttggaaatattggtaggtttgtgttgcaacagtattaccagagaagtagagttcgacaacagagataacgttcagtacagaggtatctttgatattgataacaaactcattaccagtagctgggagtatgttacgtacaacttgtggtagaacaatttttcgcatggtttgtccgtgggtgaaaccaagtgcagttgcggcttcaaattgtcctttatcaacagagaaaataccaccacgtacaatttcgctcatataagcaccagtattgattgaaacaataaatatagctgctagtgtacggtccagcgaaactccaaaagcttgtgctgttccgtagtagataaccatcgattgtacaatcataggtgtcccgcggaagacctcaatatagatgttaagtaaccaacctaataatttttgtaaggcagcctttaacttattgtcagattttggtgctgtacggaaaacaccgatgagaaggccgataaataatccgacgattgttcctaccatagaaattaggagggttgtagctgttcctctgaggaattgagaaccattgttttttaaaatagttgccatctgttcaaagaagtttggtttcccatttttttcttttttaacggatggctgttctttaatcatcttatccatcaaggcgatttgtttatctctagaaatgctttcgagaacttgattaacttgattaatacgattgtcacctttacgcatcccaacagaaatatttgtatcggcatcagatgttttaaacccttggtgcagttcaatcatttttaatttaggattagcagtttgagcggaagttgcatctggacgttctgaaacataggcgtctacaacaccagattctacagcttgtcttaattgattgaagtcccccatggcaacttcttttttgacaccattgatttgatcaatgaggttgtataagtagactccttgttgggcagttactttagcatttttgaaatcactaatatttttagcattagtatattttccttcagcattaacaactagagtaggttctgaaatgtagtaaggctttgaaaaattaatttcttttttacgttcttcggtaggactcattcctgcaataatcatatcgagttttccagaagttagtgctggaacaaggccttcccattttgttttgacaacaacaacttttttatttaactttttagctaactttttagcgacttgtacatcataaccattagcatattgatcagttccttcaataggaactgcaccatttgtgttatcattttgtgtccagttgaaaggagcataggctgcctccataccgacacgtagatattcatctgcttgtatacttgtcatacctccaaaggtgataagcaaagcagtgaataaacttagtaatatttttttcattcaacagcctccgataagttacttcctcctattttaccgaaaaacaaggtcgatttcaatatcattatcttattgaaagcgattaattgtatttttatgttaaaatggtatacaaacaaaggaaggaggatgataatgaagaaatgttttttggctatttgtttagctcttagtttttttatggtttcagttcaagcagatgaggtggactataacattcctcattatgagggtaatctaactattcacaatgataatagtgctgattttacagagaaggttacttaccaatttgattcgtcctataatggacagtatgtcacattaggtacggcgggtaagttacctgacaattttgatattaataataagccacaggttgaagtttcaattaatggtaaagtaaggaaagttagttaccagatagaagatttggaggatggctaccgtttgaaagtgtttaatggtggtgaagcaggtgatactgttaaagtcaatgttcagtggaaactaaaaaatgttctatttatgcataaggatgttggtgaacttaactggattcctattagcgactgggataaaacgttagagaaagtagatttttggatatcaactgacaaaaaggttgctctttctcgtctttgggggcacttgggttatcttaaaactcctcctaaaataagacaaaataataatcgttaccatttgacagcttttaatgtaaacaaacgattagaatttcatggttattgggatagatcttattttaatctacctacaaacagtaaaaataattacaagaaaaaaattgaatatcaagagaagatgatagagcgtcatggttttatcctaagtttcttgttaaggatattattaccttcattctttattattgtgacactattcatctcaattagggtgttcctgtttagaaaaaaagttaataaatacgggcaattccctaaggaacatcatttatatgaagcacctgaggacctttcaccactagagttaactcaaagcatttatagtatgagttttaaaaattttcaagatgaggagaagaaaactcaccttatcagtcaagaacaactcattcagtcaattctattagacttgattgatagaaaagtattgaattatgatgataacttgttatctctagctaacttagatagagcttctgatgcagaaatagattttatagagtttgcttttgcggattctacgagtttgaagccagatcaactcttttctaattaccaatttagttataaagaaacactacgtgaactgaaaaagcagcacaaggcttcagatctgcaaactcaaatgagacgccgaggaagtaatgccttatcaagaattacgcgtctcacaaggttgatttctaaagacaatataaactctcttagaagaaagggaatttcatccccttatcgtaaaatgtcttcagaagagtctaaagaattatctaggttgaaaagattcagttacctatcacctcttatttcttttgttgttataatttatacgctttttttaaattattttacctatttctgtatctatctcttattgtttggtgttatcctgttgttgaataaaatcatttttatgatgacaagaaaaataagtaacggttatattgtaactgaagatggagcaagtcgtgtctaccaatggactagttttaggaacatgctaagggatatcaaatcgtttgatcgttcagagttagaaagtatcgtattatggaatcgaatattggtttacgctactttattcggctacgctgaccgtgttgagaaagcactcagagtgaaccaaatagatattccagaaagatttgcaaacattgatagtcatcaatttgcgatttcagtcaatcaatctagtaatcatttttcaacgataactgaagatgttagtcacgcttctaattttagtgttaattcaggcggttcttcaggtggtttctcaggcggcggaggcggcggaggtggtggtgccttctaattttccaaaagtatggtataataaagaaaaatttatggagttattatgttaataattgaattactcaaagccctatttttaggagtcgttgagggagtgacagaatggttacctgtttctagtactggccatttaatcttggttcaagagtttatgaagttgaaccaaagcaaatcctttgttgaaatgtttaatattgttatacaacttggggcaattatggcagttattgtcatttattttaaacgccttaacccatttcagccaggtaaatctgctagagaaattcgtttaacttggcaattatggttaaaagtagtgatagcttgtattccatctattttaattgctttaccatttgataattggtttgaagctcattttaatttcatgatcccgattgcaatagccctaatcttttatggttttgtcttcatatgggttgaaaaacgtaatgcacacctcaaaccacaggtaaccgaattggcaagtatgtcttacaagacagctttcttgattggatgcttccaggttctcagtattgttccgggaaccagtcgttctggagctactattttaggagcaattattattggaactagtcgttcggtcgctgctgactttactttcttccttgccatcccaactatgtttggttatagtggacttaaggcggttaaatactttttagatggtaacgtcttgagtttagaccaatctttaatacttttagtagcaagtctgacagctttcgtagttagtttatatgttattcgtttcttgacagactatgtcaaacgacacgatttcaccatctttggtaagtatcgtatagtcttaggaagtttactcatcctctactggttagttgttcatttattctaaaatataacataaaaagctgagtattcctcagctttttagcgtgttaggctgtgaaaaattgctaaaaaatagctttttcggtataataagaaaactgaatactcgtatgaggtgatgatatggaaatgaaacaaatcagtgaaacaacactgaaaattacaattagtatggaagatttagaagatcgtggtatggagctgaaagatttcctaatccctcaggagaagactgaggaatttttctattctgtcatggatgaattagacttgccagaaaactttaaaaatagtggtatgttaagttttcgagtaacacctaaaaaagatcgcattgatgtttttgttacaaagtctgaattaagtaaagatttaaatttagaagaattagcagatttgggtgacatttcaaaaatgtctccagaagacttttttaaaacattggaacaatcgatgttggaaaaaggggatacggatgcccatgccaaattagcagaaattgaaaatatgatggataaagcaactcaagaagtagttgaggaaaatgtttctgaagaacaacctgaaaaggaagtagaaacgattggatatgttcactatgtctttgattttgataatattgaagctgtagttcgattttcacaaacgattgattttccaatagaagcttctgaactctataaaaatggtaaaggctatcatatgacaattttgctagacttggaaaaccaaccaagctactttgctaatttgatgtatgctcgaatgcttgaacatgctaatgtgggcacaaaaacacgagcttacttgaaagagcatagtattcaattgattcatgatgatgctatttcaaaattacaaatgattgagatgggataaaatgataccttttacaattgagtatatttttgtattgattggagcatttttattatcaatcattctaactcctattattcgagttatatctttgaaggtaggagcggttgataaaccgaacgctcgaagaatcaacaaagtaccaatgccaagtagtggtggtttagcaatatttctctcctttgttgtaacaacattatttttcatgccaatggcggccagtagacactttatagaagtctcttattttcactacattttgcctgtaattattggcggtctcgtagttacaacaacaggattcatagatgacatctttgaattaagacctcgttataaaatgttgggaattattattgcagctattatcatatggaaatttacacattttagatttgatagttttaagattccaataggtggtccactcttggagtttggtcctattttaactttctttttgacagttttatggattatttcaatcactaatgctatcaatctgattgatggtctagatggtctagttagtggtgtttcaattatcagtctagcaacgatggcagtggtttcttatttctttttacctaaaatagatttttttctcacgctaactattgttattttaatcgcctcaatagttggttttttcccttataattatcatccagccattatctacctaggtgatgctggtgccttgtttataggatttatgattggtgtattatcgcttcaaggtttaaaaaactccacagctgttgcagtgataacacctgtcattattttaggagttcctattttggatacagctgttgctattgtgaggcgtaaattatcagggaaaaagatttctgaagctgataagatgcacctgcatcaccgattgctatctatgggatttacacatagaggagcagttttagttgtttatggtattgcaattatcttttcgcttatcgctttgcttttaaatgtttctagtcgtattgggggaatttttcttctattggcgctactattagcgatggaaatttttatagaaggtttaaatatttggggtgagaatcggacaccactatttaatctcttaaagttcattggcaacagtgattacagacaaagtgttattgctaaatatagcgataagcatcaaaaataaaagcctgaaaaggcttttttagttttaatcatttagatagcagtcacacctcatttttgctataattatttagaatataatatcgggtgagtgccctataatatcttctttaaaccatagagaaatatcacatattctctgttaaccaagaaaaggagtgtacaatgtctgtacttgaaatcaaaaatcttcatgtttctattgaagataaagaaattttaaaaggtcttaatttaacgttgaaaacaggagaaattgctgctatcatgggtccaaatggtactgggaagtcgacactttcagcagctattatgggaaatcctaattatgaagttacagcaggtgaaattctttttgatggtgaagatattttagagctagaagtggatgaacgtgctcgtttgggtctatttcttgccatgcaatacccttcagaggttccagggattactaatgctgaatttatccgagcagctatgaatgcgggaaaggctgatgatgataaaatttccatccgccaatttatcactaagttagatgaaaagatggaactacttggcatgaaagaagaaatggcggaacgttatcttaacgaaggtttttcaggtggtgagaagaagcgcaatgaaattttacaactcctaatgttagagcctaagtttgccctcttggatgagattgactctggccttgatattgatgctcttaaagtggtatcaaagggagtcaatgaaatgcgtggtgaaggttttggtgctatgattattacacactatcaacgccttttgaattacattacaccagataaagtacacgttatgatggacgggaaggtagtattgtcaggaggaccagaattagcggttcgccttgagaaagaaggttatgctcaaatcgctgaagagcttggtttagagtataaagaagaagtctaatttgtcacttcaactagaagagaaaaggagttacaaatgtctaaagaagctatattaaattttttacaagccaaaggtgagcctacttggttacaagaattacgactaaaggcttttgaaaaaatagaagaactagaattaccagtaattgaacgtgtaaaatttcatagatggaatttaggtgatggaaccattttagagaatgactatacagctaacgttccagatttcacagagttaggaaacaatcccaagttggttcaaattgggacccaaaccgtccttgaacaagttcctatggaattaatagagaaaggcgttgtctttacagatttctattcggccttggaagaaattccagaagtcatagagcgctactttgggaaagcacgtccttttgaagaagatagacttgctgcctatcacacagcttacttcaacagtggtgcagtgctttatattccagataatgttgaaattactcaaccaatcgaaggtcttttttatcaagatagtcagtctaaagtaccatttaataagcatatccttcttattgttggaaagaatgcaaaagttagttacttagagcgatttgagtcaattggtgatgggacagaacgaacaagtgctaatatttctgtagaagtaattgcccaagcaggtagccaaattaaatttgcttcaattgatcgcctcggagaaaatgtgacaacgtttataagtcgtcgtggtcgtcacagtagcgatgcaacaatagattgggcccttggggtgatgaatgaaggcaatgttgttgctgactttgattctgatttaattggtgatggaagtcacgctaatttaaaagtagttgctgcctcgtcagggcgtcaagttcaaggaattgatacgcgtgttacaaactacggctgtaattcagtaggacatattttacagcatggggttattttagagcgtgggactcttacttttaatggtatcggacatattataaaaggtgcaaagggagcagacgcccaacaagaaagccgagttctcatgttatcagacaaagcacgttcagatgctaatcctatccttttgattgatgaaaatgatgttacagctggtcacgcagcctcaattggtcaggttgacccagaggatttatattatttgatgagccgaggcttgaaccaaaaaacagcagagcaattagttattcgtggatttttaggaacagtcattgctgaaataccagtaaaagaagttcgcgatgaaatgattgccgttattgatacaaaactagaaaaacgttaatatgacattactagatagttataaactaaagcaagatttcccaattttaaatcaattagttaatgatgagccgcttatctatttagataatgcagcaacgacacaaaaaccgaatcaagttttagaagctttgcgagactactaccaaaacgacaatgcaaatgtccatcgtggtgttcatactttagcagaacgagcgactgctcagtacgagaatgctcgtgaaaaagcaaggcagtttttaaatgctaaattaagtaaagaaattttattcacacgtggcaccacaacaggattaaattgggtagctaagtttgccgaaagtattttagaacgaggtgatgaggtacttatttccattatggagcatcattctaatattatcccatggcaacaagcttgcgagagaactggcgctaaattggtttatgcctatctaaaagatggttctttagatttagaagatttctataataaattatcctctaaaactaaatttgttagtttggcacatatctcaaatgtacttggctgtgttacaccagtaaaagcaatagcagaacgtgtacatcaagttggggcatacatggttgttgatggagctcaatcagcgccacatatggcgattgatgttcaagaccttgattgtgatttcttcgccttatctggccataagatgcttggtcctactggtattggtgttctttatgggaaagaaagcattttagataagatgccacctgtcgaatttggtggtgaaatgattgattttgtctatgagcaaagtgcaacatggaaggaattgccctggaagtttgaagctggaacgcctaatattgctggagcgatcgcttttggagaagctttagattatttaacggatgttggtatggatgagattcatcaatatgaacaaagtttagtttcttatgtgttgcctaaattacaggctatcgatggtttaactatttacggacctagtgatgctgaatctcatgtaggcgttattgccttcaatttagaaggtttacacccacatgatgtggcaactgcaatggattacgaaggagtggctgttcgtgcaggtcatcattgtgcacaaccccttattaatcatcttggtatccattcggcggttcgagcaagtttctatttctataataccaaagaggattgcgacaaattggtagacgctatccaaaaaactaaggagtttttcaatggcactctctaaattagataatctctacatggcagtggtagctgatcattcaaaacaccctcatcatcatggatttttagaaggcgttgaacaagtgcagttaaataatcctacatgtggagatgttatttccttatctgttaaatttgatggaaatattatttcagatattgcatttgctggtaatggttgtacaatttctacggcttcatcaagcatgatgacagatgcagttattgggaaaacaaaagaagaagcattgcagcttgctgatgtattctccaaaatggttcaaggcgatcaaaatccaaaacaagagaaacttggggatgcagagtttctagctggggtatcaaaatttccacaacgtatcaaatgtgctacgctttcgtggaatgctttaagaaaggctattgagagagataatcaggcagaactctgacaaccatagttgaaggaattacatttaaacaacttttactgacataaggtagtctagtagaagaatgtcttaaatttaaatattaaagaaaggataagtatgtccgaaataaatgaaaaagtagaaccacagccaatagatcttggggaatataaatttggatttcatgacgatgtaaagccaatttattctacgggaaaaggtctaaatgaggctgttattcgtgagttatctgcagctaagggtgaacctgagtggatgttggactttcgtctaaaatccttggaaacgtttaataaaatgccaatgcagacctggggagcagatttatcagatattgattttgatgatattatttattatcaaaaagcatctgataaacctgcgcgtgattgggatgatgttccagaaaaaatcaaagaaacttttgaaagaattgggattccagaagctgaaagagcttatcttgcaggagcatcagcacaatatgaatcagaagtggtttatcataatatgaaagaagaatatgataagctgggtattgtttttacggatactgactctgcacttaaagagtacccagagctattcaaaaaatattttgctaaacttgtccctccaacagataataaattagctgctctgaactctgctgtatggtcaggtggaacatttatttatgtccctaaaggtgttaaggtggatattccacttcaaacttacttccgtattaataatgaaaatactggacaatttgaacgtactctcattattgtcgatgagggagcaagtgttcactatgttgaaggttgtaccgccccaacttattcttcaaatagtttacatgcagctatagttgaaatttttgcacttgatggagcttatatgcgctatacgactattcaaaattggtccgataatgtctataatttagtgacaaaacgtgctaccgctaaaaaagatgcaacagttgagtggatagatggaaatctaggtgctaaaacaacaatgaaatacccatcggtttaccttgatggtgaaggagcacgtggcacgatgttgtctattgcttttgcaaacaaaggacaacaccaagatacgggtgcaaagatgattcataatgctccccatactagttcatccattgtctctaaatcaattgctaagggtggaggaaaagttgattatcgaggtcaagtgacatttaataaagattccaaaaaatcagtgtcacatatagaatgtgacaccatattgatggatgatatttcaaaatcagataccataccgtttaatgagattcataattcacaggttgctttagagcatgaagcaaaggtgtctaagatttctgaagagcaactgtactacttgatgagtcgaggtttatctgaagctgaggcaacagaaatgattgttatggggtttgttgagccctttacgaaagaattaccaatggaatatgcggtagagttaaaccgcttaatttcctatgaaatggaaggttcagttggttaattgaagatttcaagagataataaaaagcccctatgttattgatgaagggggcttttatattagcacagttattatctagagcgctttataagtaatactatcccagctaaaagacaaaggatagcgatggtgcccagaacaattaaaatagatacaaaatgtgattgaataaattgatctgtttttgtccaccactgttcttttgtttgaggctgttcttgaatagatttggttttggttttagtaacttcttttttaggtttaacggcttttaatacaggagttttagaagaaatatttttagcgtctttaaaacctttttctacaagagcgttgacaaacggatgacgatagtactctccgtcttggtctgaccaatcaccaactcctaaaaccacagttatcaagcgagtattctggcgtttagctgtaactaaggcattaaaagcagcgctagggctagaaccagtttttaagccatctactccttctaatccaaatttagcgccgggggtagagtagttataagttgtaaatgtttcttcataaggagttccgaccatggccttgacttcaggatattttgtatagttcagtatatcagggtattttttaaggaaatgataggttaaaattgatagatcacgtgcagtcgtaacgttagtagcattgttatcgtattcttttggggagtaaagtccattaaaagcactcgctaccgccccactggggttataaaagtgagtttttgtcataccgagtttcttggcggtttcattgattcgtttaatgaaggcgtcaggattgttttgtgataagtggttagcaatcataatagttgctacattagatgacgggacagctgtcatagtaatcagttcacgaataggataagcaaccccagcatgaatattattattactaatttcataaatcttacttatggcttggtctgtttctgttgcagtcactgtggtgttgaggcttgtttttcctttagctaagtcttcaaatagtaaatataaagtaaacattttagacatgctagcgggatcacgttctaaatcagcgttatcttcccacaaaatatgacctttattgtcaataacgatagacgctttaggtttattaatatctttaacatcatatccggcttctcgggtaatttgcataatatctttatgttcttcagcttgcacagagtttacacaagtcagggataataaaatgcagaggaaagatacgattaatttaggcataggtaactcctgaaaactttttattaatattataacaaaaaatcactaataaaaaagacatttcattagtgatttttaattttatatattctcctaaacctagctaaagaaactgctgtgcagcaactccttgtgtcaaagggagattactattaaagtttttcgttaacgtagcgcacaaaatgattccaccacactttgaggaagaaactgcgctcaatactatcttttgccactaaatgaacgctaggttcctttatgagatagccttttccaaccttattaaggtcaacgtaataagctttccctaggttctctttttttgtaataggagcagtaagctcttttttaaagttaatttttaactgattttgtttagtgatatttttcttctgtactactttcaaatcgtttttagcaacagcgatgaccgattgttcttttccgtctctcacacttgcttctttacctttatatgcagctcctttagctaatacaaggttaggttcgtaggtgtttgtgatatagttcaagagagagttagttgctgtaaagcgagcatatttgtctttatcggccttatcagcatgcataataacagtgagtagtctcattccactttcagtagatgtagcaataaaagattggccagctaattccgttgtcccagttttcaaacctgtaatacctggtctaaagacaggcatatctggtagcatgtagttataagaatgcataatatctttatcaaatttagcaacggacttactagtaatcttaagaatggaaggatattcgttgaccaaatggtaggcaacaatagcaatatcacgtgcactcattttattttcgtcgttttgtgacgattttggataaatgtgattgcctaacatactattatttaagccagaagcattgactaggtggctatcatgaattccccacttttccaattgagcagtcattttatcaacaaatttactttcggttcctgaaatatgttcagccaaagcaatggctgcactgttagcactagaaatcatggcagcgtccacgagctgtttaacagtatagcgccttttttctaaaggaacattactagcatcagattcgcgtgttagttgataagggtagtcagatatatttactttggtattccacttgaggttaccgttatcaatttctttatagaccatataaacggtcattattttagtcaaggaagcaatagcagcgggtttgttagcatctttttcatacaagatttttcctgaatctaaatcaactgccaaggcatgtttagcggaagcattaaaagattcagcagagatggttggcataaaaaaaatgcaactaagtaatagaatagaagtaataatttttttcaaaataacacctttagaaattttttaaactttgtccatcctattatatcatatcactatatcatactaggaattattatttttgataattaaataaagaaaacgtttgttataaaaatgtaaaaaaatgtaaaaaaatgaaagttaaaaaattatctgaaaattttgcgtttttgtcttttcttaagaattttttgtggtataatgttagtcactagataaatgaattaggagaacaaagctatggcaaaacagaaaaataactggcgccgtgttggagttggtgtccttacacttgcttcagttgcgactcttgctgcatgtggaagtaaatcagcttcccaggattctaatggagcgattaattgggctattccaacagaaatcaatacactagatttatctaaagtcacagacacttactcaaatctagctattggtaactctagtagtaatttccttcgcttagataaagatggaaagacaagaccagatttggctactaaagtagatgtttcaaaagatggcttaacttatacagctacattacgtaaaggcttgaagtggtcagatggcagtaaacttactgcaaaggattttgtttattcatggcaacgtttagttgatcctaaaacagcttcacaatatgcttaccttgctgttgaagggcatgtgcttaatgccgataaaatcaacgaaggacaagagaaagacttgaataagctaggtgttaaggcggaaggcgatgacaaagttgttattactttatctagtccgtctccacaatttatctactaccttgcattcactaacttcatgccacaaaaacaagaagttgttgaaaaatatggaaaagattacgcaactacttcaaaaaatacagtttactcaggaccatatactgttgaaggttggaatggttcgaatggtactttcacgctgaagaaaaacaaaaattattgggacgctaaaaatgtaaaaacaaaagaagttcgcatccagactgttaaaaaaccagataccgccgttcaaatgtataaacgtggtgagttagatgcagctaatatctcaaatacttctgctatttatcaagctaataagaataataaagatgtcacagatgttctagaagcgaccactgcctatatggaatataatactactggttctgtgaaagggcttgataatgttaagattcgtcgcgccttaaacttagcaactaaccgtaaaggagttgttcaagcagccgttgatacaggctcaaaaccggcaattgcttttgcacctactggtttagccaaaacaccagatggaactgatttggcaaaatatgttgccccaggttatgaatataataaaactgaagcagcaaaactctttaaagaaggtttggctgaatcaggcttgactaagctaaaattaacaattacagcagatgctgatgctcctgctgccaaaaactctgttgactatatcaagtctacttgggaagctgctcttccaggacttactgttgaagaaaaatttgtaacctttaaacaacgcttagaagacagtagaaaacaaaactttgacatcgtagtttctctttggggtggggattatccagaaggatcaactttctacggcctctttaagtcagattcacaaaataacgatggaaaatttgctaacaaggactatgatgctgcttataacaaggcaatttctgaagatgcgatgaaaccagcagaatcagcgaaggactataaagaagcagagaaaattttatttgagcaaggtgcttataacccactctacttccgtagtggtaaaggtttacaaaatccaaaattaaaaggtgttattcgtaatactacaggtttgtcaatagactttacacatgcttataaaaaataattaaattactttacactaaacctttgcaagaattggtaattgccagttcttgcttttggttaagtaaagaaagtgaaagagtttgctatttttagcaattctaagaaaaggaaatgatatgattaaatatattttaaagcgtgttgctattttgttagtaacgctatgggttgtcataaccctatcgttctttctgatgcagatccttccaggaacaccctacaataatccaaaactcactgaagaaatgatcgcattgcttaataaacagtatggtttagacaagcctgtatggcaacaatatttgacttacctttggaatgtacttcatggtgactttggaacgagttatcaatcagtgaatcagccagtatcacgtatgattagcttgagattaggagtttcagtacatctaggtgttcaggctctcgtatttggtgttttaggcggtattttggtaggagctatttcggcacgtcataagaatgataaagtcgatggtatcttaagtgttattgcaacgctagggatttctatgccttcatttatcattggtatcttattattagactattttggatttaagtggaacttgttgcctttatcaggttgggggactttctctcaaaccattttaccttctttagctctaggactccctacattagcatctgtttcacgcttcttccgtagtgaaatgattgaaactttaaattctgattatgtgcaactagctcgttcaaaaggtatgacaattcgtcaagtaactcgaaaacatgcttaccgtaattctatgattccaattttaactctaattggccctttggcggcgggtctgttaactggttctgcactaattgagcagattttctcgattccaggaattgggcagcagtttgttacttcgattccaacaaaagactatcctgttattatggggacaaccattgtttatgcagtaatgttgatggttgctatcttgataacagacgttgttattagtatcgtagacccacgtgttcgcttgcagtaaggagatgttatggcagataaaaacagaacatttaaacttgtaggtgcaggatcttctagcacacaagaaaaaattgaaaagcctgctctttcgtttatgcaagatgcgtggcgtcgcttgaaaaaaaacaaattagcagtagtttcactctatttattagctcttttacttactttttcgttagcctcaaatttatttgtaactcagaaggatgctaatgggtttgattcgaaaaaagtaactacatatcgcaacttaccacctaaattgagttcaaaccttcctttttggaatggtagcattaagtacgctggaaatacagaatctacagacgcttataagtctcaaaatgtccctgaaaaagttaagtatgctttaggtacagattctctagggagaagtgttgctaagcgcatcatcgtaggtattcggatttccttacttgtagctattgcagctacattcattgatttaattatcggtgttacatacggtcttgtttcaggttttgctggaggacgccttgatacattaatgcaacgtatcgtagaggtaatttcatcaattccaaacttagttatcgttacaatgttaggtttggtccttggtaacggtattacggctattattatctctattgcttttaccggatggacttctatgtctcgtcaggtaaggaatttaaccctatcatatcgagaaagagagtttgtgcttgctgcacgttcacttggggaaagtccaattaaaatagccttcaaacatattttacctaacatttctggtattatcattgtacaaattatgatgacaatcccaagtgctattatgtatgaagcggtactttcagcaatcaatttaggtgttaaaccaccgacagcttcattaggatcattgatttcagatgcacaagaaaatttacaatattatccatatcaagttatcttgccagctttagcattggtaatgatttcattggcatttattttgcttggtgatgggttgcgagatgcttttgatccaaaatctagcgatgaataaggaggtataatcatggaaaaagaaactattttaagtgttaataatcttcatgttgacttccacacatatgctggagaagtaaaagcaattcgtgatgtcaactttgaattaaaaaaaggtgagactcttgcaatcgttggtgaatctggttcaggaaaatctgtaactaccagaactttaattggtttaaatgctaaaaattcagagatatcagggaatgttcaatttaaggggcgtaaccttgttgaactatcagaagaagagtggactaaggtacgcgggaatgagatttctatgattttccaagaccctatgactagtttggatccaacgatgaaaattggcatgcaaatagcagaaccaatgatgattcatcaaaaaatttcaaaaaaggatgctttaaaattagctcttgagctaatgaaagatgtaggtatcccaaatgctgaagagcatattaatgattacccacatcagtggtctggaggaatgcgccaacgtgcggttatagcgattgctttagctgctgatcctgaaattcttattgctgatgaaccaacgactgctttagatgtaacaattcaagcacaaattttgaacttaatgaaaaaaattcaagcagaacgagactcctccattgttttcataactcatgacttaggggtcgttgcagggatggcagaccgtgtagcagttatgtatgcagggaaaattgttgaatttggaactgttgatgaagtcttttataatccacaacatccatatacttggggattattgaattcaatgccgacaaccgacacagaatcaggtagtttagagtcaattccgggaacaccaccagatttgttgaacccacctaaaggagatgcatttgcagctcgtaatgaatttgcattagatattgatcatgaagaagaaccaccgtacttcaaagtttcagaaacacatttcgctgctacatggcttttagatgaaagatcacctaaggtgcttcctccattaccgatccaaaaacgttgggaaaaatggaacgagattgaagggaggaaagcctaatgactgaaaatcgaaaaaaattagttgaagtcaaaaatgtttctttgaccttcaataaaggaaaagctaatgaagtgagagcaattgataatgttagttttgacatttatgaaggtgaagtgtttggattagttggggaatctggatcaggaaagacaaccgttggacgttcaattttaaaactttatgatatttctgatggagaaattacctttaatggagaagtgatctcacatctgaaaggtaaagcattacatagttttcgtaaagacgctcagatgatttttcaggatcctcaggctagcttaaacggccgtatgaagattcgtgatatcgtagcagaaggtttagatatacataaattagctaaatcaaaatcagatcgtgatagtaaagttcaggccctattagatcttgtagggttaaataaagatcatttaacacgttatccgcatgaattttcaggtggacaacgacaacgtatcgggattgcacgtgctttagcagtagagcctaaatttatcattgctgatgaaccaatatctgccttagatgtttcaatccaagcacaagttgttaatttaatgcaaaaattgcaaagagaacaaggattgacttatttgtttatcgcacatgatttgtctatggtaaaatacatttcagatcgtatcggtgttatgcattgggggaaactgttagaagttggaacatctgatgatgtttataacaatccaatccacccttatacgaagagtctattatcagctattccagaaccagatccggagagtgaacgtcaacgtgttcaccagccgtataatccagctattgagcaagacggacaagaacgtcaaatgcacgagattacccctggtcattttgttttatctacaccccaagaagctgaagaatataaaaaacaaatattataaaagatggctagcccatcttttatttttttactaataaaataaatttaggtatggaattttaaactctatgttattggtgttagccaacaggaaacttttttcagaaaatgtagaaaaagtatgaaaaaagagttgacaaagtaagagatgatgtagtaaactaaataagttgtctcgagagagcagtttctattagcgcgtagttaacaacttaaaaaaagtagttgacaaagcagaataagtttgctagaatatagaagttgtctcaagagaggcaaagacctttgaaaactgaacaagacgaacgaatgtgcagggtggatttacattgtaaatccgtcaatgacaaaaaacaataaatctgtcagcgagacagaaaagagcaaagctcaaacttttaatgagagtttgatcctggctcaggacgaacgctggcggcgtgcctaatacatgcaagtagaacgctgaggtttggtgtttacactagactgatgagttgcgaacgggtgagtaacgcgtaggtaacctgcctcatagcgggggataactattggaaacgatagctaataccgcataagagtaattaacacatgttagttatttaaaaggagcaattgcttcactgtgagatggacctgcgttgtattagctagttggtgaggtaaaggctcaccaaggcgacgatacatagccgacctgagagggtgatcggccacactgggactgagacacggcccagactcctacgggaggcagcagtagggaatcttcggcaatggacggaagtctgaccgagcaacgccgcgtgagtgaagaaggttttcggatcgtaaagctctgttgttagagaagaacgttggtaggagtggaaaatctaccaagtgacggtaactaaccagaaagggacggctaactacgtgccagcagccgcggtaatacgtaggtcccgagcgttgtccggatttattgggcgtaaagcgagcgcaggcggttctttaagtctgaagttaaaggcagtggcttaaccattgtacgctttggaaactggaggacttgagtgcagaaggggagagtggaattccatgtgtagcggtgaaatgcgtagatatatggaggaacaccggtggcgaaagcggctctctggtctgtaactgacgctgaggctcgaaagcgtggggagcaaacaggattagataccctggtagtccacgccgtaaacgatgagtgctaggtgttaggccctttccggggcttagtgccgcagctaacgcattaagcactccgcctggggagtacgaccgcaaggttgaaactcaaaggaattgacgggggcccgcacaagcggtggagcatgtggtttaattcgaagcaacgcgaagaaccttaccaggtcttgacatccttctgaccggcctagagataggctttctcttcggagcagaagtgacaggtggtgcatggttgtcgtcagctcgtgtcgtgagatgttgggttaagtcccgcaacgagcgcaacccctattgttagttgccatcattaagttgggcactctagcgagactgccggtaataaaccggaggaaggtggggatgacgtcaaatcatcatgccccttatgacctgggctacacacgtgctacaatggttggtacaacgagtcgcaagccggtgacggcaagctaatctcttaaagccaatctcagttcggattgtaggctgcaactcgcctacatgaagtcggaatcgctagtaatcgcggatcagcacgccgcggtgaatacgttcccgggccttgtacacaccgcccgtcacaccacgagagtttgtaacacccgaagtcggtgaggtaaccttttaggagccagccgcctaaggtgggatagatgattggggtgaagtcgtaacaaggtagccgtatcggaaggtgcggctggatcacctcctttctaaggataaggaaacctgccatttgcgtcttgtttagttttgagaggtcttgtggggccttagctcagctgggagagcgcctgctttgcacgcaggaggtcagcggttcgatcccgctaggctccattgaatcgaaaggttcaaattgttcattgaaaattgaatatctatatcaaattccacgatctagaaatagattgtagaaagtaacaagaaaataaaccgaaaacgctgtgaatatttaatgagttttctagttttaaagaaactaggttaataaggttaagttaataagggcgcacggtggatgccttggcactagaagccgaagaaggacgtgactaacgacgaaatgctttggggagctgtaagtaagcgctgatccagagatgtccgaatgggggaacccactagttaatgactagtatccatatctgttaaggatatgagaaggaagacgcagtgaactgaaacatctaagtagctgcaggaagagaaagcaaaagcgattgccttagtagcggcgagcgaaacggcaggagggcaaaccgaagtgtttacacttcggggttgtaggactgcgatataggattaatcattatagaagaattacctgggaaggtaagccaaagagagtaacagcctcgtatttaaaatgatagattaaccttagcagtatcctgagtacggcgagacacgcgaaatctcgtcggaatctgggaggaccatctcccaaccctaaatactctctagtgaccgatagtgaaccagtaccgtgagggaaaggtgaaaagcaccccgggaggggagtgaaatagaacctgaaaccgtgtgcctacaacaagttcgagcccgttaatgggtgagagcgtgccttttgtagaatgaaccggcgagttacgatatgatgcgaggttaagttgaagagacggagccgtagggaaaccgagtcttaatagggcgtcatagtatcatgttgtagacccgaaaccatgtgacctacccatgagcaggttgaaggtgaggtaaaactcactggaggaccgaaccagggcacgttgaaaagtgcttggatgacttgtgggtagcggagaaattccaaacgaacttggagatagctggttctctccgaaatagctttagggctagcgtcgatgttaagtctcttggaggtagagcactgtttgggtgaggggtccatcccggattaccaatctcagataaactccgaatgccaacgagatataatcggcagtcagactgcgagtgctaagatccgtagtcgaaagggaaacagcccagaccaccagctaaggtcccaaaatatatgttaagtggaaaaggatgtggggttgcacagacaactaggatgttagcttagaagcagctattcattcaaagagtgcgtaatagctcactagtcgagtgaccctgcgccgaaaatgtaccggggctaaaacatattaccgaagctgtggatgacacaaaagtgtcatggtaggagagcgttctatgtgtgaagaaggtgtaccgtgaggagcgctggaacgcatagaagtgagaatgccggtatgagtagcgcaagacaggtgagaatcctgtccaccgtaagactaaggtttccaggggaaggctcgtccgccctgggttagtcgggacctaaggagagaccgaaaggtgtatccgatggacaacaggttgatattcctgtactagagtatatagtgatggagggacgcagtaggctaactaaaccagacgattggaagtgtctggtcaaacagtgaggtgtgatatgagtcaaatgcttatatctttaacattgagctgtgacgaggagcgaagtttagtagcgaagttagtgatgtcacactgccaagaaaagcttctagcgatacatatactctacccgtaccgcaaaccgacacaggtagtcgaggcgagtagcctcaggtgagcgagagaactctcgttaaggaactcggcaaaatggccccgtaacttcgggagaaggggcgctgattttagatcagccgcagtgaataggcccaagcaactgtttatcaaaaacacagctctctgctaaatcgtaagatgatgtatagggggtgacgcctgcccggtgctggaaggttaagaggagtgcttagcgtaagcgaaggtatgaattgaagccccagtaaacggcggccgtaactataacggtcctaaggtagcgaaattccttgtcgggtaagttccgacccgcacgaaaggcgtaatgatttgggcactgtctcaacgagagactcggtgaaattttagtacctgtgaagatgcaggttacccgcgacaggacggaaagaccccatggagctttactgcagtttgatattgagtatctgtaccacatgtacaggataggtaggagcctatgataacgggacgccagtttcgtttgaggcgttgttgggatactacccttgtgttatggctactctaacccagataggcaatccctatcggagacagtgtctgacgggcagtttgactggggcggtcgcctcctaaaaggtaacggaggcgcccaaaggttccctcagactggttggaaatcagtcgtagagtgtaaaggtataagggagcttgactgcgagagctacaactcgagcagggacgaaagtcgggcttagtgatccggtggttccgtatggaagggccatcgctcaacggataaaagctaccctggggataacaggcttatctcccccaagagttcacatcgacggggaggtttggcacctcgatgtcggctcgtcgcatcctggggctgtagtcggtcccaagggttgggctgttcgcccattaaagcggcacgcgagctgggttcagaacgtcgtgagacagttcggtccctatccgtcgcgggcgtaggaaatttgagaggatctgctcctagtacgagaggaccagagtggacttaccgctggtgtaccagttgtcttgccaaaggcatcgctgggtagctatgtagggaagggataagcgctgaaagcatctaagtgcgaagcccacctcaagatgagatttcccatgattttatatcagtaagagccctgagagatgatcaggtagataggttaggagtgtaattgtggtgacacatttagcggactaatactaatagctcgaggacttatccaaaaagagatattgacaacgttacggtttcttgttagactatagatattcaattttgagtgaataaggctcaatagttaagtgataattgcctaggagatacacctgttctcatgccgaacacagaagttaagccctagaacgccggaagtagttgggggttgccccctgtgagataaggtagtcgcttagctataatccgccatagctcagttggtagtagcgcatgactgttaatcatgatgtcgtaggttcgagtcctactggcggagtagataaagggagactaactttggttagcctttttttattggaattattatccttaagattggctagcatcttaattgtccgaatttgtcatttgttatgttataatatggatattctatattttattagggaggttttatgaaaatttttgagaaagctcctgccaaacttaatttaggattagatattaaaggacgatgtgacgatggttatcatgaattagctatgattatggttagtattgatcttaatgactacgttaccatttctgagctaaaggaagattgtattgttatcgattctgatagtagcaaaatgcctttaaataatgataatgatgtgtttaaagctgcagatataatcaaaaatcaatatggtattaataaaggtgttcatattagattagaaaaatccattcctgtctgtgcaggactggggggtggttctactgatgctgctgctacaataagagctcttaatcgattatggaatcttcaaatggactatgacgaaatggttgctattggttttaaaattggtagtgatgttccttattgtcttggtgggggatgttcgttagtattaggtaaaggtgaaattgttaaacccttaccgacattgagaccatgttggatagttctggttaagccggattttggtatttcaactaaatccatttttagagatattgattgtaagtctataagtagagttgatattgatttattaaagtctgctattttgtcatcagattatcagttaatggtcaaatctatgggaaattcactcgaggatattacaattactaaaaatccagttataagtacaataaaagaacgtatgttaaattctggagccgatgttgcattaatgacaggaagtggaccaactgttttttcaatgtgttctacagagaaaaaagctgatcgtgtttttaatagtatgaaaggtttttgcaaagaagtttataaagttaggttgttgagataaaaggttttatcttcttcacctatctatgattgattcttctatatcttcgtgatataatttactggttaacaaaaaagaggtatatatgacagttttagaacaaaaattagaccatttagtgagtcaaatcttgcttaaagcagaaaatcaacatgaattattgtttggtacttgtcaaagtgatgttaaattgactaatacgcaagaacacattctgatgcttttatcacaagagcagttgacaaattctgatttagctaagaagttaaatattagtcaggcagctgtaactaaagcagtaaaaagtttaatttctcaggatatgttgaaagcgaataaagattctaaagatgctcgtattacttattttgagttatctgaacttgctaaacccattgcagatgaacacacacatcatcatgacaatacgttaggggtttacggaagattagtaaatcatttttcaaaggacgaaaaggtcgttttagaacgttttcttgatcttttctctagagaattagaagggtaatcatgcgatatattacagttagtggtcttacttttcagtacgatagcgatcctgtgctggaaggggttaattaccatttagacagtggggagtttgttaccttaacaggtgaaaatggggctgctaaatcaactttaataaaggctactttaggtattttaacgcccaaagtgggtacagttaatatctctaaagaaaacaaagaaggaaaaaaattacgtattgcctatttacctcaacagattgcaagttttaacgctggctttccatcgtcagtttatgaatttgtgaaatctggacgataccctagaaatggttggtttagaagactgactaaacatgatgaagaacatattagggttagtttagaagctgttggtatgtgggataatcgccataaaaagataggaagtttatctggcggtcaaaagcagagggctgtcattgctaggatgtttgcttctgatccagatatttttgtattggatgagccaacaactggtatggacgcagggactactgagaaattttatgagttaatgcatcataatgctcataagcatggtaagtctgttttgatgattactcacgatcctgatgaagtaaaggggtatgctgaccgaaatattcatcttgttaggaaccaatctttaccatggcgttgtttcaatgtccatacaaacgaaatggaggttgaatcagatgctacttgatatgctttcctatgattttatgcaacgagcgctcttagcagttgtggctattagtatttttgctccaattttaggcatcttcctaattttacgtcgtcagagtttgatgagtgatactttgagtcacgtttccttagccggtgttgcattaggcgttgttttaggtatctcgcctacatggtcaactattttcgttgttactttggcggcagttgtattagagtatttgcgtactgtatacaaacattatatggaaatatcaactgctatcctgatgtcgatggggttggctatatctttaatcgttatgagtaaagctcataatgttggtaatgtcagtcttgaacagtatttatttggttctattattactattgggaaggaacaagtgattgctttgtttgttattgcattaatcacttttattttaaccatcctatttattagaccaatgtatatattaacgtttgatgaggatacagcttttgtagatggattgcctgtgcgtacaatgtctattttgttcaatgttgttacaggtattgctattgcattaacaattcctgccgcaggtgctctattggtgtcaactattatggttttaccagctagtattgctatgcggttaggtcgaaattttaaaactgttatttttctgggtatgttaattggatttgtgggaatggtagctggtattttcctttcgtattattgggagacacctgctagtgcaacaataacgatgatttttattggcattttcctattagttagcttagtaggcttgcttcgcaaacgttaaataaaaaaatctatcttattctaggatagattttttatttatctccctgtttttttcgaatatattttatgagggatcagttgagaaattatctcgatgaggtatctactaagttttctggcttaagttgatagaaggggcaatgtgaatctatttttgcgttttaggataaaaaatactaccggcaattttgccggcagtaaattgtaattattgtgcttcagtagtgctgtgatgtttgtgttgatttaacgcttcttgttcagtcatttgaacgatattagcggtatttgcattttttatgttttctaaactataccaataagtatttgaacgacccttatttgcaacgtagacgattctattttggggagctacattatttgtatctgattcagaagtattagtgttagtattttcttctatatcagatgcactttcaatagctgcttcgttttcatcagcatcgctatttggatcttcaccttcttctgcctgtttcccatcttctttgattagcataccagttttgtaatcaatttttgcgagtggagacgtattttctaatgtaacagttgtgacgccgtattcatcaacttgttctttgccgccgcctaatttgatttctagaagttttccttgtttatcaattccaacatactgaagttcaactcggctaggtactaaattatttccttcgtatattggagtcactttgtaatcaagctagaaatttttatgatttgccaaccaactatctaatctattttcgtagtataacataccatcaggattattttcgctaaatcctgtatttagatatttggtcatagtaactaggttctcaggaacattgttcattcctgaaaattgataaccaacgaggtgacctcggtctataagccaagttgttttacccttttcagtagtaaatttgtagttgtgccaaccggttggattatacgtcagtctttctctttttatcttaggctcatctgcatcccttaattgtatgtgagaatatgttgctctttctaagttatctaatgaacctaccttgatttgcttattatgagtaaacggtaagatttttttgaagaagtacttacatactgtgtctcaacatgggatgtcgtcttataatgtttagccttagcttcaacattctgttgtaatgccccaacgcatagtacgacagttaatagtggtagtgatttgtataattgtttagataatttcataaacctaaacccttctaaatgatatttgtgaaggcctttcacaagtataattttatcattttattgggaaaaagtaataaaaaaacataactagttaattttttttggagattatgttatttaactagatagttattaaagttaaatgttatagatatactgttattacataataatttttatatgatttgttattttattagattttttaatggattatttctttagctgattttgattacaaagttaaggtattctaatcatattttcttgatttataacatgtaaaggttagaataaattcgttggtgttagacagacgatatttgttgtttttatgaaaaaattgtgggtattagatatgtatattttttcgataactatttactctatggtaaaaattctaagctgtttgtttggtgttatttcttaataaaaataaggtagtcatgtataataactataatttaaaagttgtctcttcaggaatgttgttcattaataaaaagtgtagtcaattgactacactttttattgtcttgaaatattattatcagagtatcgattacacttcaagtctatttaaagtttaatacaaagtattttttctttccacgacgaatgactgtaatttcattttcaagcttatcattttctgagatagtatattctaaatcttgaatacgatctccattaatataaatagctccattggagacatcttctcgagcttgacgtttagaattgacaactcctgaagtgactagaaggtctatgatattgaggttatcttccgtctgaacgtgataatttggtactccacgtaaaccttgtttgagctctttaacagacaatccttttatattgccagcaaatagctgttccgtgatattaacggcctccttataagctttttcaccatgaacaagagttacaacttcacgtgctagtgttttttgtgctaagcgttggtgaggtgcttcctcgaattgaatacgtatatcttctatttctttaaggcttaggaatgtaaaaatcttaaggaagcgaacggcatcagcatccataacattgagccaaaattggtacatttcataaggagaggttttgtcagcatcaagccaaacagcatttccttcagattttccgaatttttttcctgtagaatctgttatcaatggaacagtcataacatgagatacaccatttgattttcgtctaataagttcggttccagcagtcatgttgccccattggtcagaaccaccaatttgcaaagtgacattatagttcttatttaattcgtaaaagtcatatccttgcataatttgataagcaaattcagtataggaaatccctgtttcgatacgttttttaacagattctttactcatcatataattgacagtaaaatatttaccaacatctcgtaagaaatcaatgaaactaatattgctgaaccaatcataattatttaccaatacagctttgttatcacctgtttcaaactctagaaaattagataattgaccgcggattttattaccccaactaactacagttttctttgtttgtaaactgcgctcaacatctttaaatgaagggtccccaataagtccagttgcgcctcccacaagtgcataaggcttgtgaccagcaagttgtaagcgacgagaggttaaaatagcaactaaatgtccaagatgaaggctgtcagccgtaggatcgtagccagtatagtaagagacagaaccttcttcaagagctttgcgtaaagcatcttcgtcagttgtctgaaaaacgagtccacgttctttgagttcatcaaaaatattcatctttttctcctaattattaacttgttgtgtattaatgtcaactatatcaaaactctttaggatatgcaagttatattaaatctgatataatgtaggatgaggtattattcatgtttaaaggtaataagaagttgaatagttctaaattaggtgattacacaccacttgaatttggttctatttttttaagaattgtaaagcttttatcagatttcatctatgttattattttactatttgttatgctcggagtaggacttgcagtagggtatcttgctagtcaagttgactctgttaaagtaccaagtaaaaatagtttagtgacacaagttaatacacttactagggtgtctaggttaacttattctgataaatcacaaatttcagagattgccactgatttacaacgtacaccagtggcaaaggatgctatatctgataatattaaaaaggctatcattgcaacagaggacgaaaatttcaatgaccataaaggtgtagttcccaaagccgtactacgtgctgcagcgggatctgttctggggtttggagagagtagcggtggttcaacgctgacacaacaattattaaagcagcaaattttgggagatgatccgtcatttaaacgcaaatcaaaagaaattatttatgctctagcattagagcgttacatggataaggattcgattttatcagattatttaaatgtatcaccgtttggtcgcaataacaaaggacagaatattgcaggtattgaagaagcagcacaagggatttttggagtttccgcaaaagatttaacaattcctcaggcagctttccttgcaggtttaccgcaaagtcctattgtatattctccttatactgcagatgcccagttgaaatcagataaagatcttagttttggtataaagcgccaaaaaaatgtgttatacaatatgtatagaacgagagctttaaccaaagatgagtacaaatcctacaaagattatgacatcaaaaaagattttatcaaacctgcagtggcgacaacaaatcatcatgattatctttactactcggcattatctgaagctcaaaaagtgatgtacaattacctcattaaaaaggataatgtttcagagcatgatttaaaaaatgatgagactagagcgacgtacagacaccgcgctattgaagagattcaacagggagggtatactattaaaactactatcaataaatctgtttatcaagccatgcaggatgctgcagctcaatacggagggttgttagatgatggtactggcaaggttcaaatgggaaatgtactaacggacaattctagtggtgctattataggatttattggtggtcgtaactatagtgagaatcaaaataaccatgcttttgatacggcacgctctccagggtcaagtattaaaccgatattaccttacggaattgctattgatcaagggatgttaggaagtggtagtgttctttcaaattatccaacgacatattcaagtggcgaaaagattatgcatgcggatgaagaaggtactgctatggttaaccttcaagagtcattggacatttcttggaacattccagctttctggacttacaagatgctacgagatcgaggcgttgatgtaaaaaactatatggagaaattagactatccaattgaaaactttggtatagaaagtttaccacttggtggtggtattgatacgtcagttgctcagcaaacaaacctttatcaaatgattgcaaatggtggtgtttatcataagcagtatatgatagaaagtatagaggatagtaatgggaaagtgatttataatcacgaaagtaaacctgtccgtgtcttttcgaaagcaacagctactatcttacagcagctattacatggaccaattaactccggaaagactacaacctttaaaaatcgcttacaaggtttaaatagtggtttagctggggtagattggattggaaaaacgggtactactaactcaacttctgatgtttggttgatgctttctacacctaaagtgactttaggtggatgggcaggacatgataataatgcctctttagcgaaattgacaggttacaataataatgctaattatatggctcacttggttaatgctattaataatgcagatggcaatacttttggtaagtcagaaaggtttagacttgatgatagcgttataaaagctaaagttcttaagtctacaggtttacagccaggtgtagtaacagtaaacggtcgtcgaatcactgttggaggtgaaagcacaacaagttattgggcaaaaaatggacctggaacgatgacctatcgttttgctattgggggaactgatagtgattatcaaaaagcttggtctactttgggtggaaaacgataacaggtttacgatactgatagttttatttgaggagaatagagtgatctgttctccttttattttttccaagataatatgatttaattcttgtatagtcttctttcaaagaattagaaaaacaccagtatgctatgtttaaaaatcatcgtgttatgctaaaactcaagggtgttgatgaacaaattgaaattctagaagcttccttgaagtcaagagaataaaacttgatttattggtgaaaataagttataatgtacgtaactatttgtcgtctgtctaggttgaaatattgtccgacctagatatacagcagttaaatcaacttgataaagtgagatttagctgctctttttgtgcctaattttaagaaaaaaggttattgtaatatatatttaaactttctgaaaattaccacaaacgacatctataagcttgttcttgttaggcgagcaaatgaaataaactcactaagttttatgagataaaaacttagtcactctatctttaaaaaggagctaaaaacttggcaggacatgaagttcagtacggaaaacaccgtacacgtcgtagcttttcaagaattaaggaagttcttgatttaccaaacttaattgaaattcaaactgattcattccaagattttcttgatgctggcttgaaagaagtatttgaggatgtacttccaatttcaaactttacagatactatggatcttgaatttgttggttatgaattaaaagaacctaaatatactttggaagaagctcgtatccatgatgctagctactcagcacctatttttgttactttccgtttagttaataaagaaactggtgaaattaaaactcaagaagttttctttggtgattttccaattatgactgaaatgggtactttcatcatcaatggtggtgaacgtatcattgtttcacaattagtccgttctcctggtgtttactttaatgataaggtagataaaaatggaaaagttggttatgggtcaactgttatccctaaccgtggagcttggttggaacttgagacagacgcaaaagatattgcttatacacgtatcgaccgcacacgtaaaattccatttacaacactagtccgtgcacttggtttctctggagacgatgaaattgttgacatctttggtgacagtgaacttgttcgcaatactattgaaaaagacattcataaaaatccaagtgattctcgtacagatgaagcacttaaagaaatctatgaacgtcttcgtccaggtgaaccaaaaactgcagacagctcacgtagtcttttagttgcacgtttctttgatccacgtcgttatgacttagcggctgttggtcgttataagattaataaaaaactgaatcttaaaacacgcctattgaaccaaacaatcgctgaaaatttagttgatggtgaaacaggagagattcttgttgaagctggaaccgttatgacacgagatgtcattgattcaattgcagagcatatcgatggagacttaaacaagtttgtctacacaccaaatgattatgctgtagttactgaaccagttattcttcaaaaattcaaagttgttgctccaactgatccagaccgtgttgttactattgttggaaactcaaatcctgaagataaagttcgtgccttaactcctgcagatattttagcagagatgtcatacttcttaaaccttgcagagggtatcggtaaggtagatgacattgaccatttaggtaaccgtcgtattcgtgcagttggtgaattacttgcgaaccaattccgtatcggacttgctcgtatggaacgcaatgtccgcgaacgtatgtctgtacaagacaatgaagtcttgacacctcaacaaatcattaacattcgtccagtgactgccgccgttaaagaattctttggttcatcacagctgtcacaattcatggaccaacacaaccctctatcagaattgtcgcacaaacgccgtctctctgccttaggacctggtggtttgacacgtgaccgtgctggatatgaagttcgtgacgtgcactatacccactatgggcgcatgtgtccgattgaaacacctgaaggtccaaacattggtttgattaataacttatcttcatttggacacctcaataaatatggatttattcaaacaccatatcgtaaagtagatcgttctactggtgcggtaacgaacgaaattgtttggttgactgctgatgaagaagatgaatttacagttgcacaagccaactctaagcttaacgaagacggtacatttgcagaagaaatcgttatgggtcgtcatcaaggtaataaccaagagtttccttcaagcattgttgactttgttgacgtgtcacctaagcaagtagttgctgtcgcaacagcatgtattcctttcttggaaaatgatgactctaaccgtgccttgatgggtgccaacatgcaacgtcaggctgtgccattgattgatccaaaagcaccatatgttggtactggtatggagtatcaagcagcccacgattcaggtgcagctgtgattgctaaacatgatggtcgtgttattttttcagatgctgaaaaagttgaagtgcgtcgcgaagatggttctcttgatgtttatcatgttcaaaaattccgccgttcaaactcaggtactgcttataaccaacgtaccttagttaaagttggtgatctcgttgaaaaaggtgattttatcgccgacggaccatctatggaaaatggtgaaatggctcttggacaaaacccagttgttgcttatatgacttgggaaggttataacttcgaggatgccgttatcatgagtgagcgccttgtgaaagaagatgtctatacatctgttcacttggaagaattcgaatctgaaacgcgtgatacaaagcttgggcctgaagaaattactcgtgaaattccaaatgttggtgaagattcactacgtgatctcgatgaaatgggaattatccgcattggtgctgaggtaaaagaaggtgacattcttgttggtaaggtaacacctaagggtgaaaaggacttatctgctgaagaacgtctcttgcatgccatttttggtgataaatcacgtgaagttcgtgatacttcactacgtgtacctcacggtggcgatggagtagttcgtgacgttaaaatctttactcgtgcaaatggtgatgaattgcaatcaggtgttaatatgcttgtccgcgtttatatcgctcaaaaacgtaaaatcaaagtcggtgataagatggccggtcgtcacggaaacaaaggtgtcgtctcacgtattgttcctgttgaagatatgccttacttaccagatggaacgccagttgatatcatgttgaacccacttggggtgccatcacgtatgaatatcggacaagttatggagcttcatttaggtatggctgctcgtaatttaggtattcatattgcaacgccagtctttgatggggcttcttcagaagacctttgggaaactgttcaagaagcaggtatggattcagatgctaagactgttctttatgatggtcgtactggtgaaccattcgataaccgtgtgtcagttggtgtcatgtacatgatcaaacttcaccacatggttgatgataaacttcatgcccgttcagtaggaccatactcacttgttactcaacaaccacttggaggtaaagctcaatttggtggacaacgttttggtgagatggaggtttgggcgcttgaagcttatggtgcttcaaatgttcttcaagaaattttaacatacaaatctgatgatgttacaggacgtcttaaagcttatgaagctatcacaaaaggtaagccaattccaaaaccaggtgttccagaatcattccgtgttcttgtaaaagaattgcaatcacttggtcttgatatgcgtgtccttgatgaagatgacaacgaagttgaactccgtgatcttgatgaaggtgaagatgatgatgtgatgcacgttgatgaccttgaaaaagcacgtgtgaaacaagaagctgaagaaaaacaagctgaacaagtatctgaagtcgttcaagaagattaaatttatctagtttataactagaagcgaatatagaattgatatgcaatgctagtcctaggatttattgaaatcctagctgggctagtatgatgataaatcgaagaaaggtaaaactagtggttgacgtaaatcgttttaaaagtatgcaaatcacattagcatcaccaagtaaggtccgttcatggtcttatggtgaagttaaaaaacctgaaacaatcaactaccgcacattgaaaccagaacgtgaaggactttttgatgaagttatttttggtccaacaaaagattgggaatgtgcgtgtggaaaatacaaacgtattcgttacaaaggaatcatttgtgaccgttgtggcgttgaagtaacccgtgcaaaagttcgtcgcgaacgtatgggacatatcgagttaaaagcaccagtatctcatatctggtatttcaaaggtatcccatcgcgtatggggctcacattggatatgagtcctcgtgcacttgaagaagttatttattttgcggcttatgttgttatcgatccaatggacacaccattagaaccgaagtcactccttactgagcgtgaataccgtgaaaaacttcaagagtacggttacggttcgtttgttgctaaaatgggtgctgaagccattcaagatcttcttaaacgcgttgatttagatgcagaaatcgcagttcttaaagaggagttgaaatcagcgacaggtcaaaaacgtgtgaaagcagttcgtcgtctggatgtgttagatgcctttaaaaaatctggaaataaaccagaatggatggttcttaacattttaccggttatcccaccggatcttcgtccgatggttcaattagatggtggtcgttttgcggcatcagacttgaatgacctttaccgccgtgttattaaccgtaacaatcgtttggcacgtttgttggaattaaatgctcctggcatcatcgttcaaaatgaaaaacgtatgttacaagaagctgttgatgcgcttatcgacaatggtcgtcgtggtcgtccaattaccggaccaggtagtcgtcctttgaaatcattaagccatatgcttaaaggtaaacaaggtcgtttccgccaaaacttgcttggtaaacgtgttgacttctctggacgttccgttattgctgttggtccaacactcaaaatgtaccaatgtggtgtaccacgtgaaatggctattgagctcttcaaaccttttgtaatgcgtgaaatcgttgctcgtgacctcgcagggaacgttaaagcagctaaacgtatggttgaacgtggggacgagcgtatttgggacatcttagaagaagttattaaagagcacccagtacttctaaaccgtgcacctactcttcacagattaggtatccaagcgtttgaacctgtccttattgatggtaaggcgcttcgtcttcacccacttgtatgtgaggcctacaatgctgactttgatggagaccaaatggccatccacgttccattgtctgaagaagcccaagcagaagctcgtcttttgatgcttgctgcagagcacatccttaaccctaaagatggtaagccagtcgtaacaccatctcaggacatggttttaggaaattactacctgactatggaagatgctggtcgtgaaggtgaaggcatgattttcaaagatcatgacgaagcagttatggcatatcaaaatggttatgttcatttacatacacgtgttggtatcgctgttgattcaatgccgaataagccttggacagaagagcaaaaacataaaatcatggttacaacagttggtaagattctcttcaacgatatcatgcctgaagatttaccgtacttaattgaacctaataatgcaaacttgacagaaaaaactccagataaatacttcttagagccaggtcaggatattcaagcagttattgataacttagagattaatattccctttaagaagaaaaatcttggtaatattatcgcagaaacttttaaacgtttccgtacaacagaaacttctgctttccttgaccgtttgaaggaccttggatattatcattcaacacttgctggtttgactgtgggtattgctgatatcccagttattgacaataaagctgagattattgatgcagctcaccacagagttgaagatatcaataaagccttccgtcgaggtttgatgactgaagaagatcgttatgttgctgttacaacaacatggcgtgaagctaaagaagcacttgaaaaacgtcttattgagacacaagatccaaagaaccctatcgttatgatgatggactcaggagctcgtggtaacatctcaaacttctcacaacttgccggtatgcgtggtttgatggctgctcctaacggacgtatcatggaattgccaatcttatcaaacttccgtgaaggtcttagtgttttggaaatgttcttctcaactcacggtgcgcgtaaaggtatgactgatacggcccttaagacagccgactcaggttaccttactcgtcgtttggttgacgttgcccaagatgttattattcgtgaagatgactgtggaacagaccgcggtttgacaatcacagcaattacagatggtaaagaggttactgagacacttgaagagcgtttgataggacgttatactaagaagtcaatcaaacatcctgagacaggtgaaattctcgttggtgcagataccttaattactgaagatatggctgctaaagttgttaaagcgggcgttgaggaagtaactatccgatcagtatttacatgtaacactcgccatggtgtttgtcgtcactgttacggtattaacttggcaacaggtgatgctgttgaggttggtgaagcagttggtactattgcagctcaatctatcggtgaaccagggacacagcttacaatgcgtaccttccataccggtggtgttgcttcaaatactgatattacacaaggtctcccacgtatccaagaaatctttgaagcacgtaaccctaaaggtgaggcagttattactgaagttaagggtgaagtcgttgcaattgaagaagactcttcaacacgtactaagaaagtattcgttaaaggtcagacaggtgagggagaatacgttgttccatttacagcacgtatgaaagttgaagttggtgatgaagtagctcgtggtgcggccttaactgaaggatctatccaaccaaaacgtctccttgaagttcgtgatactttatctgttgaaacgtacctacttgctgaagtacaaaaagtttaccgtagccaaggggtagaaatcggagataaacacgttgaggtaatggttcgtcaaatgctccgtaaagttcgtgtcatggatccaggagatacagatcttcttccaggtacacttatggatatttcagactttacagatgctaacaaagatattgttatttctggtggaatccctgcgacaagccgtcctgtccttatgggtattactaaggcttcccttgaaactaattcattcttatcagctgcatccttccaagaaacaacacgtgtccttacagatgctgctatccgtggtaagaaagatcacttacttggtcttaaagaaaatgttattatcggtaaaatcattccagcgggtactggtatggctcgttaccgtaatattgaaccacttgctgttaatgaagttgagattattgaaggaactcctgttgatgcagaagttacggaagtatcaacacctacaacagaagattaatcaaaaagaacttgagtttaactcaggttctttttttacaagaatttggaatgagcagatattttttattttattcttattttttatataatactctctaaaggaagtgtattatgtatcaagttgtaaaaatgtttggtgattgggaaccatggtggtttattgaaggttgggaggaagatattactgaaattgctgagtatgataccttatcagaagctttgctctattttcaagaggagtgggataggggacaggaaaagtggccttattttcaaagtaagtctagtttgttggcaacgttttggagtataaaagaaaaacgttggtgtgaagaatgtgatgagtacctccaacagtatcattccttaatgttattgaaagaatggcaagaaattcctaaggaagaatctattgagcgatttgaagtatttaataagatagctgagttgccatcggcatgttctttaaatttgtaattaaaagtagtttaaaaaagttagatagtttttatggggatataataggtttgttcagcctctgcttcataatatttatgttactacctctcaagaaatcattgaaaagatctcaccaattggtgagatttttttattttattttcgaatatatggttaaggaggttacgggatggttcaatcattagcaaagcaagtcattcatcaggcagtagaagtaaatgctcaagatatttatatcattcccaaaggtgattgttatgaactctatatgcgtattgatgatgaaaggcggtttattgatgtttttgagtttaataggatggctagtcttattagtcactttaaatttgtggcaggcatgaacgttggagaaaaaagacgaagtcaattaggttcttgtgactatgaactgtcagagggaagactggtttcattacgactatcgagtgtgggagattatcgtggtcaagaatctttagttattcgtattttgtattcaggtcatcaggacttaaaatattggtttgataatataaagcaaatgaaggaagtactgggtataagagggctatatcttttttccggccctgtggggagtggtaaaacaactctcatgtatcaattagcttcagaagtatttaaaaataagcaaattatcacgattgaagatccggtagaaatcaagaatgacaagatgttacaactccaattgaatgaggatattggaatgacttatgatgctttaatcaaactgtctttacggcatcgtccagatattttaattatcggagagattagagatcaagcgacggcccgtgctgttattcgtgcaagtttaacgggagtgatggttttttctactattcatgctaaaagtattcccggagtctatgataggcttatagaattaggggttaactatcaagagttagaaaatagtctaaaattaatagcatatcaacgtttaattggaggaggaagcctaattgactttgagacaggtaattttaaaaaacactcatcagacaagtggaatagacaagtggatatcttggctgaagaaggacatatcagtaagaaacaggcacaagtcgaaaaaattatccctcaagaaacaacggaaagtagtccaactttttaataatctttttgctagtggtttttctttaactgatatggtcaccttcttaaagaggagtaagttattgtctgattgttatacagatagtatgaataaggcattattagagggaaaagatttatcaaaaatgttaggagagttaggtttttctgacactgttatcacacaggttgcattagctgatttgcatggtaacatttcaaggagcctactaaagattgagtcttatttagctaatcttttgttagttagaaaaaaagtaatagaagtagctacttacccattgatattattgtcttttctggtgctaattatgattggccttaggaattatttaatgccccaattaggagaaaataattttgcaactagactgattacaaatgtgccgaatattttcttattacttttagcagttgtacttatttttagtttaatattttatattattcaaaagcgattgtcgcgcattaaagtagcttgttttttaacaacaattcccttagttggatcatatgttaagctttatttaactgcttactatgcccgtgagtggggaaatttattaagtcaaggtattgaattggaccaaattgttaaagtaatgcaaaatcagaaatccaaactttttagggaaataggatatgacatggaagaaggttttctatcaggtaaagcatttcaccaaaaagtattagactatccgtttttcttaactgagcttagtttaatgattgaatatggccaagttaaggcgaaattaggaacagagttagatatatatgctgatgagaagtgggaggatttttttacaaaattagctagagcgacccagttaatccaacccgttatttttatttttgtagctcttatcattgttatgatttatgcagcaatgctgttaccaatgtatcaaaatatggagatattatcatgaaaaatttattgttaaaatgtaaggataagaaggttaaagcatttacacttttagaatgtttggtagcattggttacaatcacaggagctttactagtttatcaaggactgacaaaattgttggctcaacagatagtagtgatgtcttcttccagtcagtctgaatgggtgttattaactcagcaactaaatgcagaatttgaaggcgctcatctggaatatttaagacagaacaaactttatttacgtaagcaagataagattgtaacctttggcaaatctaataaagatgatttccgtaagacaggttatgatggtcgaggttatcaaccaatggtttatgggttagacaattgtcaaatgagtcagaccaaaagtatggtaaaacttgttttttattttaaggacgggttaaaaaggacattttactatgattttaaagaagaaacttaaagctggcatccttttgcaagctattgtattggctgctgtatttacactcgtcttacagttttatctagcaagaatattggcaacagaaagacagtatcatagccaaattgaagcaagtaaagcttatttaacagcgcagttagcttataaaacaatagaaggtgactccatatcaggaaaatgttattttacaggaggatatgcttcatacctccaagaagggaactatttacaagttaaggttacattggataagggaggaaactataaccataagttttatcgtaaaacagacactctccaagtacctctcaagtctaatgataataaagcaagccataaacattaaaaatatacagtgatgaaatattagtaagacaaggttttgcttaaaaacaggatttttgtttgcttctcttttcagatgctgtgttttttgttatgataaattctggaggaaatcatgaattttgaaaaaattgagacagcctatgagctgattttagaaaatatccaaacgattgagaaccaattaaaaactcatatttatgatgccttaattgaacagaactcttattaccttggttcaagttgtgatttagatatggttgtggtgaataaccaaaaattacgtcaacttgacttaagtcaagaagaatggcgtcgcactttccagttcatttttatcaaatctgcgcaaacagagcaattacaagctaatcatcagtttacgccagatagtattggttttatcttgttatttcttttggaagaattaacgagtcaagagacagtggatgtcttggaaattggaagtggaactgggaatttagctcagactctcctcaataacagctcgaaagagttaaattatatgggcattgaagttgatgatcttttgattgatctatcagcaagcattgctgaaattataggttctagtgcccaatttatccaagaggatgctgttagaccacaaattttgaaagaaagcgatgtaatcattagtgatttaccagttggctattatcctaatgatggtattgctaaacgatatgctgtatcaagttctaaagagcacacctatgctcaccatctattgatggagcaatctcttaaatatttgaaaaaagatggaatcgctatatttttagcacccgaaaaccttttaacaagtccacaaagtgatttgctgaaggagtggttaaaaggatatgcagatgtcattgccgttttaactctaccagaaactatttttggaagtcgtcaaaatgcgaaatctatatttgttctcaagaagcaagcagaacaaaaaccagaaacctttgtatatccgctgacagatttgcaaaatcgtgagaatatggcaaacttcattgaaaattttcaaaaatggagcagagaaaatagtcattactcaaaaaatatgataaaatagagattgtgaaaacgctttagagaggtaaattatgtcaaaaacaatagcaattaatgctggaagttcaagtttgaaatggcaattatatgaaatgccagaggagaaagtagttgccaaagggattatcgaacgtattggtttgaaagattctatttcgactgtaaaatttgacgataaaaaagatgaacaaattttagatatcgtagatcatacccaagctgttaaaattcttttagaagatctaacaaaacatggtattatcaaagactttaatgaaattacaggtgttggtcatcgtgtcgttgctggtggtgaatattttaaagagtctgctttagtagatgataaagttgtagaacaggttgaagaattatcagctttagctccactccacaacccagcagctgcagcagggattcgtgcgtttagagaaatcttaccagatatcacgagtgtatgtgtatttgatacagccttccatacaacaatgcaacctcatacctacttatatccaatcccacaaaagtactatactgattataaagtacgtaaatacggtgcacacgggacaagccaccaatacgttgcacaagaagcagctaagcaattaggacgtcctttagaagaattaaaattaatcacagcacatgtgggtaatggtgtttctattacagcaaattatcatggacagtctattgatacatcaatgggattcacaccacttgcaggaccaatgatgggaacacgttcaggagacattgatcctgcgattatcccttatcttgtagctaatgatccagaattggaagatgcagcagctgttgttaatatgcttaacaaacaatcaggattgcttggagtatcaggaacttcaagtgatatgcgagatattgaagcaggtcttcaaagtaaagatccaaatgcagtgttagcctataatgtctttattgaccgtattaagaaatttattggacaatacttggcagtattaaatggcgcggatgctattatttttactgcaggtatgggagaaaatgcgccattaatgcgtcaagatgttatcgcaggattatcatggtttggcattgaacttgatccagaaaaaaatgtttttggttattttggagatatcacaaaaccagattcaaaagtgaaggttttagttattcctactgatgaagaattaatgattgcgcgtgacgttgagcgccttaaagctaaataagttatcaaaaaattgataagaccagaaaagttgatagtttaactatcaacttttttgtcttttgaacagatatgtaaaatgtacttgacaaaaaatgtatagttaactatactatgaatgtaaagctaactatacaaaaaaggtgtaagatatgaaaaattctctacaaaagttacgaaaatctaggaaattaagtcaagcagaacttgcagttgcacttggagttactaggcaaactattatttctctagaaaaagagaaatacacggcatctttggagctagcatttaagatagcgcgttattttgataaacaaattgaggaagtttttatttatacagaaagtgaaggaggatagaattttaatggaaaaatacagtccacaaaagacaaaaggttaaaagttaatctgtaatatgtcaaggatgtggactattgatttttgtccaccaatcgtttaccagcaatatgtttttatcattactattagtattagcattgcgatgtctatttttgctatttatcgctatgcttcattgaagaaaacgatataatagctgatgattaaattgaagttttagaaagtagtattctatgttaataaaaggattattgtcacccaatagtaaagtatctccgaaggattacaaagtatatatgagagttttgtcttttgtttttagtgtatgtagtttgattatgatagtatcatcatttctacatacctttgaatctaattttactaaaggtttttcctttggttcaggtattgccttatttgcaggaagtttttattttttggtgataacatttagtgaaaagcgatttcaacattactataccaaagtttttgatgagcgtaatcaatttattgctaatatgtcttgtcgacttcttttccttttatctgtccttgttttagtggtattgtgtctgattaatgtctggtttggtataactttttcctatgcaaagttcttgctattgatactctcttttattttatatggttatttattaatttactttattttacagaagttattgtgagataagtctataagatttgaaaatatgttatgatagaaaaaagttaataatttattttggaggtttttgtgtcatttattattagaaaaggcaaaattttagctttgctaatagcatttttagttattaatcaacttgttcctatattggctgtgtggctcctaaagaatcactatcaaacgccttttactagtatattgttgattggcttagaattacttattattgctcttttcctttattatgccaaggttaaacaaataatcagatggaaagcattattgacaaggaaagcattagttactattctcttaggttggttatcattgagggttccacaaattattggttacctcattatgactatgcaaggggttaaagatacagcaaatcaaacagtaattatggaattaacaaagcaacttccactagctttgatgttaatttttgccataattggtgcccctattatggaagaaattatatttcgctatattatccctaaagaactttttgcgaaacatcaaaaatggggttttgtcatcggtactttagcttttgctcttattcattccccttctgatataggtagttttattatttatgctgggatgggtgctattttatcttttgtttattataaaactgagcacttagaatatagtataatgattcattttattaacaatgctcttgcttatagcgtgttaatcagtacaatgatgaataactaaaaaaactttgagcaatttgctcaaagtttttttgctttctcaatagtagcatcaatggcagaaataacactatgcgtcagaccatttttttctaagtctaaaaggccagcaatagtagttccgcctgggctacaaatgttgtcgattaagtcagaggtgctattttgtccttgtaataggttttgactagaagctaagacagtctgtcctacaatagagagtgcttgttcttttggaaatccatattttacacctgctttagctaaggcttctataaatagatagatataggcagggctagaacctgctagagcagtgaaggtatcaaaattggtttctgctatatcaaagctacttccaaaactatccgtaatttctttggctaattgtcgtaactcatctgatacatgattgttgtaacaaatagctgtgcaactttgaagtatttgtgcgttaatatttggcataatacgaatcaatggtaaatcagaacgagttaattggcttaaacgcgctaaggagattcctgctgccattgagatgattggttttgtgatatcaagtggaagaagaaccttttcaaatagttgaggtttaatacctaacatgataatatcagcttgattgattaatgactgatgagattcggcgtaagtaacatcaagtctttctgcaatttcttttgaacgctctaagcaagatccggatatgataatgtcatgttgggtttgtttgaggccttgaataattgcactggccatttttccgacgccgataattccaattttcataatgttgatatggggatgaaaggagatactaaaatgtgtctaccttatgaaactcccatcctttctatcttaataacctttaataatatccaccgtcgagcggtctaatttgttaacgatggcctgaaggtaagcttgtgcttgtagaaaatcatccatagcgtagagtgtttgatgagaatgaatgtagcgtgcacagacaccgatagttgtagaaggaataccactattttttaggtgagcagccccagcatcggtaccaccatttgcagcataatattggtattttatacctgcttcttcagctgttgtaagtaagaaatctctcatatctttaagcatgatatgtccgggatcataaaaacggattaaggttccctctcctattttgccttgttccccataaatatctccagctggggaacaatcgacagctaagaagatatctgggttgaatttagttgttgaaacatgtgcgccacgaagtccgacttcttcttgaacatttgccccagcaataagtgtgttgctaagactttgatcttttaagctttttagcaattcggtcaccataagcacaccatagcgattatcccaagcttttgacataatatgtttttgatttgcagttaaaatggtttcagatttaggaacaatgatatcgccaggagcaatgccaaagctttcagcttcatttttatctgtgaatcctccatcaaaaacaatgtcactaattttgggtaatgttgttccaccgctttgtccacgaagaaagtgaggaggaactgagcctgatataacaggaatagcatcaccagaacgtgtgtagagggtaaagcgttgtgagctgactactaggggattccatcctccaacctcaagtacacgaaatgttccatctggctgaatatgactaaccataaagccgacttcatccatatgggcagcaaccatgactttaggagcattagtctcatgagtatttttaactccaaaaattccaccaagtccgtctgtctcaacttgatcaactaaaggagttatttcttgacgaaggaagttgcggatattgtgttcatagccagcaatcccatcaagctcagttacggttttaattttgttaaataaatctgacataattacctcaattctacaaatactattttagcaccttttaattaaaaataaagaacagaacaggtttcagtcaatataaagactttcaaaaagaatatcaagtactatcggaagactgttatgactgacaaagcctattatagtgaaaactgggttgaatacaacggagataatgtttatcggcttaagctaataaaaaggtagatagaaaagataatacggctaaaaaagtgataaccatagcaattaaagtcaaatttttggggtgattcttattgattaaaaatgaagttgtgcaaagcagtattagcgtcacaatagcaaaaagttctccattttgaagacgaaataaaaaccagtgatcacctaggaagagtagacctagcaaacaatttaaagcaggtactaataatttttctttcatgttttttctttctgtttgaatgattaaccataatggtatcttaagacaatgtcatcctattataccacaaggaataagttgttttttttcataactgttatgtggatttcttccatcaattcctgtgtctaattccggggggtatggtataataacagttatgaaaaataaaaaaatcttatttgggactggccttgctggtgtgggtttactggcagctgctggttataccctaactaaaaaagtaacagattataaacgtcagcaaatcactcagaccttaagagaattttttagtcagatgggtgatattcaggtattttattttaatgaatttgaatctgatattaaaatgaccagtggtggtcttgtcttggaagatggcagaattttcgaattcatttatcgtcaaggtgttcttgattatgtggaggtgagcaaatgattttaccagaatcttatgaagaaatagcagcctatattgatagcactaagaaagttgttttcttttttacagcagattggtgtccagattgtcaatttatatatccagtaatgccatcaattgaaaaagatttctcagattttgtctttgtacgtgttaatcgtgatgactatatagaattagctcagcagtggaatatttttgggattccgagtttcgttgttgtggaaaatggtcaggaactgggtcgtttggttaataagaatcgcaaaacaaaggctgaaattactaaatttctcgctgaaattaactataaataagacagaaaatagcaaaatttaaaggagaataaatgatttttacttataatagagagcatgttggtgataccttaatggttattgttaaggatagtcaaggagctaagctagatgttgatcgtcgcggacaagtagcacgcgtctatctgcaagatagtaaagaaacagttgcttggaatatctttgaagtgtcaagtttaattgttattgagggagcaggtcaaataactttatctgatcaagatattaaaatccttaatgcagaactactgaaagaaggattcgaagactctcttgttaataatattgaacctacatttgttgtggcgcaaattaaagaaataattgatcatccagatagtgaccatttacatatctgtcaagcagaaatcaacgatgggaagacggtccaaatcgtttgtggggcacctaatgcttcagtaggtcttaaaacagttgcagctcttccaggagctatgatgccaaatggtagccttattttcccaggaaaacttcgtggagaagatagctttggaatgttatgtagtgctcgcgagttagctcttccaaatgctcctcaagtcagaggtatcattgaattatctgatcaggtaattgttggagagtctttcgacgccaataaacattggaaaaattagtaaaaatcaacttagcttcagctaagttgatttttagttgtaaacttaagaagttacaatgactttttaagtgtgatgtgttgcaaaaaagcaatatctttataaggagctttgtcagcaacacttagctcgatagcaagcattttgtttagccaaccagtttcagttttaaaatggtttggttgtaatgaatagaaggtacgaataccctgataacgttcaactaataaatttgtattttgttttagttcttctaaggtataaatatttccctggtcaaaactggcacttttaaagtttgcttctcctgttaagagttccatcgcagtggaggtatcattgctaaaaataactgattgtaatattttaccggttatattatgtttgatgagagatagttctccattgggttttagaagtcgagaaaattcgtcaaaataagcaggatgattatgtttgtctatatattcaagaacattatgacaaataatagtatcaaagctttgatcaggcaaatctcttaatgcttcgtaggaacctaggattttataaatattgtcactttgattatcgtaaagcagtttaggattgggttcaatagcagttacattgttttcttttgctagatgttgttcggtgagacaaaaaccagctccaaaatctaaaacgttctgatttttgatatggcttaattgagcaaaagttatttcatattgtatttttccccaaggtttagccagcatttctttataactagttacatttgtcatcttaattctcccagaacaatttcatatattttagcatttttcttccttattttcgaataataatagtgaggaggtaatcaatgtataataaagttattatgattgggcgtctaacagcaaagcctgagatggtaaaaacaccaactgacaagtcagtgacgcgtgcaactgttgctgttaatagacgctttaaaggaagtaatggtgagcgtgaagcagattttattaatgtggttatgtggggtcgtctagcggaaacccttgcgagctatgggacaaagggctctttaatttcaatagatggtgaattgcgtacgcgcaagtacgaaaaggatggtcaaacgcactatatcactgaagtattagcatcatcatttcagttgctagaaagccgtgcccaacgtgctatgcgtgaaaataacgtttctggtgatttgtcagatttagtattggaagaagaggagctccccttttaaataaaatcactctcaaaatatcatttctaaatatactggttgcttttcacagaaagcaacctttttttattgaaaatagaaaggcaaacgattacaataaaggggatagaaagcaggtttaagatggaaaaagtcattatttttgatatggacggcgttattgttgattccgagtacacgtttttagataataagacagaaatgttacgtgaggagggtattgatacggacgtctcgtatcaataccagtacatggggactacttttgaattcatgtggcaagctatgaaagaggagtttggcttaccgaaaacagtaaaagagtatattgctgagatgaacagacgtcgacaagcgattgtggcgcgtgatggtgttaggcccatcaaaggagctcagcgactgattcattggttacaccaacatggctatcgcttagcagttgcgtcctcatctccaatggtagatattaagcgtaatctaaaagagttgggtgtgacagaatgctttgaatacatggttacaggagaagatgtatcgtcttctaaaccagcaccagatgtttttcttagagctgcagagcttttagatgtagaccctaaagtttgtatagttatagaagatacaagaaatgggagtttagctgctaaggcagcaggaatgtattgctttggctttgctaatcctgattatccaccgcaagatttatcaatggcagacaaggttatttcagattatcaagatatctatatttatcttccggagtaaaatggtatcttgaggaggataagcatatgttgatggtgttgttattccaaaggctaggaattattatgattttagcctttttattggtaaataatagttattttagacagttaattgaagagcggtctaaacgtgaaacggtagtccttgtcatcattttcggcttgtttgttattatatctaatataacaggaattgaaataaaaggggatcgaagtttggtcgagcgcccttttctaacaacgatttctcattctgactcacttgctaatacaaggactttagttattacaacggcaagtttggttggtggacctctggttggatcaattgttggttttattggaggagttcatcgcttttttcaaggaagcttttcaggttctttctatattgtcagttcagttctagtcggcattgttagcggaaagattggtgataagcttaaggaaaaccatctctacccttcaacaagccaagttattttaattagtattattgccgaaagtatccagatgctatttgttggcatttttacaggatgggaacttgtcaaaatgattgtcattccaatgatgattttaaatagtttaggttccacacttttccttgcgattttgaaaacttatttgtcaaatgaaagtcagttacgcgcagttcaaacgagagatgttcttgaattgactcgacagactctgccctaccttagacaaggtttgacaccgcaatctgctaggagcgtttgcgaaattataaagaggcatactaactttgatgctgtgggattaacagatcggtcaaacgtattagctcatattggtgttggccatgatcaccatattgcaggacaaccggtcaaaacagacttatctaaaagtgttatttttgatggcgaaccaagaattgcgcaagataaagcggcgatttcttgtccagatcacaactgtcagttaaattctgctattgtagttcctctaaaaataaatgataaaactgtgggtgccttaaaaatgtactttgcaggagataagacaatgtctgaggtggaggaaaacctagtccttggtttagcgcaaatattttcaggacaactggcaatggggataacagaggaacaaaataagttagccagtatggcagagataaaggctttacaagcacaaatcaaccctcatttcttctttaatgccattaacacaattagtgcattaatccgtattgattctgataaagcacgttatgcactgatgcagttaagtactttttttagaacaagtttgcagggtggtcaggatcgtgaggtaacgcttgagcaagaaaaatcacatgtggatgcttatatgaatgttgaaaaattacgtttccctgataaatatcagttatcttatgatattagtgcaccagaaaaaatgaagttaccaccttttggtttacaggtactggtagagaatgcagttcgacatgctttcaaagaacgtaagacggacaaccatatattggttcaaataaagccagatggtcattattattgtgtttctgttagtgacaatggacaaggaatctcagatactatcattgataaattaggtcaagaaacagttgcagagagtaagggtacaggtactgctctagttaatctaaataacaggctgaatttattatatggtagtgtaagttgccttcatttttcgagcgacaagaatggtacaaaagtttggtatcgaatacctaatagaataagggaggatgagcatgaaaattttaattcttgatgatgaaatgtttgccagacaagaattatcgtttttagttgaacatagccaggaggttgacaaccctgagatttttcaggctgaggatatcagtgaagccgaaaaaatcttatttagacagcaaattgatttaatttttttagatatttcgcttagtgaagaaaatggctttactttggctaatcagttgagccaacttgcacatcccccacttgttgtttttgcgacagcttatgataactacgctgtgaaagcttttgaaagtaacgctgttgattatatcatgaaaccgtttgaacaacagcgcgttgatatggctctatcaaaagtgaagaaattgagccaactcaccactgcttcagatgtagagcaagcaatacctaaaaaagccagtgttgaattgttaaccttgacattatcagatcgcagtgttgttgttaaaatgcaagatattgttgcagctagtgttgaagatggcgaattaactgttagtacagttcagaaaacttacactattcggaagacactcaattggtttaagtcacgcgctgtagcaccatattttctccagattcatcgaaacacagtgattaatctagagatgattgaggaaattcaaccttggtttaatcatactttgttactaattatgtctaatggagagaaatttccagtaggtcgatcgtatttaaaagacctaaatgagcatttaaccatgtaaaagtgcttttgcgaacttccctttgttgtttagaagcttgaatttgcaattcggcttctttttttggtaactgagactaaaaatgaaaacgttttatttgttttgaagtacaatatagctatcaataaaacaagttaaaacattgtaataaaaggaaggggtagtgactatgaaacacaccagtaaagaaaccaaaacaaaagaagctccaatgtttattcaaatgtcaatatatgcagctattctattagtttcacaaatgatttcaatgttattaccgaaatcactaccaatcccaacgacggttattggtttggtgctaatgtatgtattgctaactgctaaaattatcaaggtagagtgggttgactcttttggggctttgatgataagcatgattggttttatgtttgtcccctcaggaatatcagtagcagcgaatcttgatatcctaaaagctgaaggcttgcaactagttgctgttattacaatctcaactgttgttatgttggtagtggtagcatatgttgcacgattaatacttgctatcagagaactcagtgtcacagatttatttaaaaagatattacctaaccactatagtaagaaagtagaggaaaaataatatggaactcttaaaaacacccatctttggtatttgcttttctttaatactctatacgataggagaacatttatttaagaagagtaaaggtttcttccttttgcagcctcttttctttgcaatggttagtggtattgtcattctttggcttatgtcaaaaggtttaggaaccgatgttaagacattttatacacaagcttataaaccaggtggtgatttaatattttggtttttaaatccagcgacaattgcttttgcagttcctctctataagaaaaatgacgttgttaaaaaatattgggtagaaattctcagcagtttagtaatcggtatgattgtttcccttatacttatcgtcgctatttctaaaatggttgggcttagtcaagtcggaattgcttcaatgttgccacaagcagcaacaacagcaattgctcttccaataacagcagcaattggagggaacacagctgtgacagcaatggcgtgtatcttaaatgcagttattatttatgcattaggtaaaaaattagtgtcatttttccatttgaatgatagtaagattggtgcaggattaggtctagggacctctggtcatacagtcggagcagcctttgcattggaattgggagaactgcaaggtgcgatggcagctatagctgtggtggttatcggtttggtagttgatttggttattcctatctttagtcatttgattggtttgctataactaatagcgtggttaaggctgaatttattcagcctttttatgatgtctattaaaatacattggattaacatggtttatgagctagtgtctagaattgtgttttacctaactttaagttattaatgataaaataacaaattttctaattaaccagttaagtaattgttctcctacttttttcttgttataatgaaaaaagttgtcaaaaatattatttatcaattaaaaaaggaggtttaatagtgactaaatatttgaagtacatctcttttgttgctttgtttctggcgagtatctttttagtagcttgtcaaaatcaaaattcacaaaccaaggagcgaacgcgaaaacaacgacccaaagatgaattggttgtttctatgggggcaaagcttcctcatgaattcgatccaaaggaccgttatggaatccataatgaaggtaatattactcatagcaccctattgaaacgttctcctgaactagatataaaaggagagcttgctaaaaaatataaaatctctaaggatggcttaacgtggtcgttcgacttaaatgatgattttaaattctccaatggtgagcctgttactgctgacgatgttaagtttacttatgatatgttgaaagcagatggaaaagcttgggatttgacctttattaagaatgttgaagtagttgggaaaaaccaggtaaatattcatttgactgaggcgcattcgacatttacagcacagttgacagaaatcccaatcgtccctaaaaaacattacaatgataagtataagagcaatcctatcggttcaggaccttacatggtgaaagaatataaggctggagaacaagcaatcttcgttcgaaatccctattggcacggtaaaaagccttattttaaaaagtggacttgggtattacttgatgaaaatacagcactagctgctttagaatctggtgatgttgacatgatttacgcaacgccagagcttgctagcaagaaagtcaaaggaacacgtcttctagatattgcttcaaacgacgttcgcggactgtcattgccttatgtgaagaaaggtgttgtgaaaaattcaccagacggttatccagtaggaaatgatgtcactagtgatccagcaatcagaaaagccttgactattggtttaaatagacaaaaagttctggatactgttttaaatggttatggtaaaccagcttattcaattattgatagaacaccattctggaatccaaaaacagcaattaaagataataaagtagctaaagctaagcaacttttgacaaaagctggatggaaagaacaagcagacggtagccgtaaaaaaggaaatcttaaatcggaatttgacctttactaccctactaatgatcaattacgagcaaacttagccgttgaagtagcggagcaagctaaagccttaggtattactattaaactcaaggctagtaactgggatgaaatggcaactaagtcacatgattcagccttactttatgcgggaggacgtcatcatgcgcagcaattttatgaatcacattacccaagtttagctggtaaaggttggaccaatattactttttataacaatcctactgtgactaagtaccttgacaaagcaatgacatctcctgaccttgataaagctaacaaatattggaagttagctcagtgggatggcaaaacaggtgcttccactcttggagatttaccaaatgtatggttggtgagtcttaaccatacttatattggtgataaacgtatcaatgtaggtaaacaaggtgtccatagtcatggtcatgattggtcattattgactaacattgctgaatggacttgggatgaatctgctaagtaactaatttagttaatgtaggctactttaagtttggagtcagagaaaacaatgtacaccttatggtgtgaatggtttcctcgactccttttttaacaattaaggagatttatctgtgaaacatattaccactgtagttatctggaagatacttaggtgtttgtcactcgtttttggagtatcaattttgacctttattttactaaaacaatcaccggttgatccagtcatggcaagtgtcaattatgacacgtcactaacccctgttcagtacaaagcgattgctcaccactatggtttggataagccagctccggtccagtattttatttggttaaaaaattttatacagggacatttagggacttcactagtttatcggcaacctgttattgatattattagatcacgggcaggtgcctctttcatacttatgggactctcctgggtcttatcgggtcttattggatttatcttaggaactttatcagctttccatcaagggaaattgcttgatcgaattgtaaggtggttttcttaccttcagatatcagtaccaactttttggattgggctcatttttttattaatcttttctgtccagctggggtggttcccgattggtatttcttccccgataggtactttgagtcaagatattacgttagctgatcgtattaagcaccttattttacctgttttcacgctaagtattctaggcattgccaatgtaactcttcatactagaactaaaatgatgtcggtactttctagtgaatatgtcttatttgccagagcgcgtggggaaacggaatggcaaatttttaaaaatcattgtcttagaaatgctatcgtaccagctattacactgcatttttcctattttggagaattgtttggaggatccgttcttgctgagcaagttttctcatatccaggactagggtctaccctaactgaagcaggacttaaaagtgatacaccgctacttctagctattgtgatgatagggacattatttgtttttgcgggcaatcttattgcggatattttaaacagcataatcaatccacagttaaggagaaaagtatgatattgagacgtcgaactattgttttatggcaactgggtatcgccatttctctcattcttagtattctagccttaaatctttatttccatagtactcccttgcaaaccaatgcagctttacggaaccttgctccttcattaaaccatctttttgggacagatggtttaggtagggatatgtttgtcagaacgattaaaggactttatttctctctacaagtctgcttattaggtgcccttatgggggtcattctggcgacagtttttggagtgcttgcaggtttaggaaatagcattattgataaaataatagcatggttagttgatttgtttattggtatgcctcatttgatttttatgattctcatttcttttgttgttgggaaaggtgctcaaggggtcatcattgcaacggctgttacacattggccttctttagcaaggcttatccgcaatgaagtctatcatctaaagaataaagaatttgtccaactttctaaaagtatgggaaaaacgccttattatattgtgaggcatcatatcctgcctttgattgcttctcaaattttcattggttttatcctcttatttccacatgtcatcctacatgaagcatcaatgactttcttaggatttgggctctctgccgaacaaccttcggttggtatcattctgtcagaggcagctaagcatatctctcttggaaattggtggttggttatctttccaggactttatcttattttggttgtcaatgcatttgatactatcggagaatctttaaagaaactcttttaccctcaaactgatcatttttaggaggtagagatatgacagaaacattattaagcattaaagacctctccatcaccttcactcaatacggaagatttttaaaaccatttcaatcaacaccgatacaagcgctgaatttagaaattaaaaaaggtgagttattagctattataggtgctagtggttcagggaagagtttattagcacatgctattatggatattcttcctaaaaatgcatctgtaacaggagatatgatttatcgtggtcaatcactaaattctaaacgcattaaacagttgcgaggaaaagatattacgttgattccacaatcagttaattatttagatccatctacgaaagtcaaacatcaggtgcgcttaggtatctcagaaaattcaaaggctactcaagaaggattgtttcaacagtttggtttaaaagaaagtgatggtgacttgtatcctttccaactttctggcggaatgctccgacgtgttttgtttacaacgtgtattagtgataaggtttctttgattattgcggatgagcccacccctggattacatccagatgctctgcaaatggttttagaccaactacgctcctttgcagataaaggaataagcgttatatttatcactcatgatattgtagcagctagtcaaattgctgatcgtattactatttttaaagagggaaaagctattgaaacagctccagctagtttctttagcggaaatggagagcagttacaaacagaatttgctagaagtttatggcgctctctcccacagcaagaatttttgaaaggagttactcatgaccttagaggctaaaaagcttggcttttatcataaaaaagatcaatggctttttaaggagattaatttagaggtagcacctggtcaagttttaggtatatttggacaaagtggttgtggaaaaactagtttatccagggtgcttgcaggttttttacatcctaaatctggtgaagtattagttgatggcagtaatttgcctagcaaagcatttagacctgtacaacttattcaacaacatcctgaaaaaacgatgaatcctttatggcctatgaaaaaaagtttggaagaagcctattacccaagtcgagatttactagatgcttttggaattcaagaaaaatggctaaatcgtcgacctagtgaactctcgggaggagaattacaacgcttttcgattgtgcgttcattacatccagagactaaataccttattgcagatgaaatgactactatgttggatagcattacacaagctagtgtatggaaaagcctgttggagattgtaaaggatagaaatttaggtctcatcgttattagtcatgatttcgctatgttagagaaactttgtaaccaatgctatatgattgaagagaatcgtatcgtatctttcaatggagattaaaaaactcacctactatatcaattagtaggtgttttttattaagagagtattgagggtgactgatctactcatgactctaacattttggtaacgttggtgagaaattctaatgttttgggtattattgactaatttattttataatttatagattttttaaaaagataagctaaggatttgcatagggatatgtaatcgtttacaattatgttgtaagctagtcttatttaagtttctgccttggagtcacagactctccgttaaatagataaggataaacagatggaacaatttaaacatgatgccaaagccttgttagaggcaattgggggtaaagaaaatattagtgcagtgacacattgtgctacacgcatgcgatttgttttgaatgacagtagtaaagctaaggtaaaggtaattgaggagttaccatcagtcaagggtacctttaccaatgctgggcaatttcaagtcattattggtaatgatgtccctattttttataatgcttttgtagccgtttctggtattgagggtgtgtctaaagaggcggcaaaatcggctgcccaaaaaaatcaaaaccctttacagcgtgtgttgacaatgctggctgaaatatttacaccgattattccagccattattgttggtggtctgatccttggttttcgtaatattttagatgccgttccatttgaatttttaggtcaaaaagttgttgatggtgtcaggcaagtagactcttctgggcatccaatttggaatactctagtagatgtttcaacgttttggagcggagtagactcttttttatggttaccaggtgaagctatatttcatttcttaccagttggtattgtatggtctgtgactcgtaagatggggactactcaaatcctcggtattgttctaggtatctgtctagtgtcgccacaattacttaatgcttattctgtagctagtacttcagcagcagacattgctaaaaattggtcttggaattttggttactttacagtacaaaaaattggttatcaagctcaagttattccagctctgttagctggtttgagcctgtcttacttagaaatcttctggagaaaacatattcctgaagttgtttcaatgatttttgtgccatttctatccttagttccagctattatcttggctcatactgtccttggacctattggttggacactaggtaaatggatttctgctatcgttcttattggattgactggtcctgtaaaatggctctttggtgctatttttggtgccctgtatgccccatttgttattactggtttgcaccacatgacaaatgctatcgatactcaactcatagcagatacaaaaacacatacaactggcctttggccgatgattgctctttcaaatattgctcagggttcagctgtactagcttattattttatgcatcgtcatgatgaaaaagaggctcaaatatcacttccagctgctatctcagcctaccttggtgttacagagccggcgctttttggtgtaaacgttaaatacatttatccatttgttgctggtatgattggttcaagtgtggcaggtcttttggcgacaacttttaatgtccaagctaactctattggtgtaggcggtcttccaggcttcctgtcaattaacgttaaatatatgggatatttctttatctgtatggcagtggctatctttattcctttatttttgacactattctttaaaaaatcaggtattttgacaaaaactgaagaggaaaaattagtacctgatgctgtcattgcttcaacaacagaaacaaaatcagcaaaagaaaaagctgtcgtatcaggtacaaagcttagtgtagtaagccctttatcaggtttagctaaaccactggatcaagctagtgatcctgtcttttcacaaggaattatggggaagggagtggttatcgatccaagtgatggagaactagtttcaccggtcgatgcgacagtttcagttcttttccctacgaaacatgctattggattgttaacatcagagggggttgagtttcttattcatattggtatggatactgttaatttagaaggaaaagggtttacctctcatgttgctcaaggtgacactgtaaaagtaggagataaactcattactttcgatattccaatgataaaagaagaaggatacattgtggaaactcctattctgattactaatcaacaagaattccgaccagaagaattgatagatttacccaaacagataaaacgtggacaagcattaatggttgccaagaaaatttaaaagtaattaggtattctttttaaaaaagagcactcttataaaatgagaggtaatttgaggaattgtttgaggggcttaatacattagctccttgaattattttgaacataagaaaaaactcataggaacaaatatcactgtaaaaatgttatatttttgatgatagttgatgttatagttagactgctaaatacagcagcattttgggaaaggagtagaatatgacgattgataaacgtaaagttgtctatcaaatttatccaaaatcatacaaagacacaactggtaatggggttggtgatcttcgtggtattatcgaaaaattaccctatttagcagaacttggtattgatatggtttggctcaacccattttatccaagtccacaacgagataatggatatgatatctctgattatacagctattaaccctgattttggaacgatggacgattttgaagaaatgattgaggtgggacgtcaataccgtatagattttatgcttgatatggtgcttaatcattgttcaatagaacatgagtggtttaaaaaagcacttgcaggagatcgctactatcaagatttctttatcttacgtgataatccaacagattgggtatctaaatttggtggaaatgcttgggcaccatttggtgatacagggaagtattatcttcatctttttgatatcactcaagctgaccttaattggcgcaatgccgatgttcgcaaggaactttttaaagttgtcaatttttggcgtgataaaggggttaaaggttttcgatttgatgtgattaatttaattgggaaagatgagatacttgagaactgcccaattaatgatggaaaaccagcttatactgatcgtccaataacacatgattatctcaagatgttgaataatgctagttttggacaagatgattccttcatgacagttggtgaaatgtcttcaacgacaattgcaaattgcattctttacactgcaccagaacgtgaagagttatccatggcttttaattttcaccacctcaaagtagattataaagatgggcaaaagtggaccattatggcttttgattttcctgcattacgtgaccttttccatagttggggcgaagggatgagcgaaggaaatggttggaatgctttattctataataatcatgaccaaccgcgagcattaaatcgttttgtagacgtgaaacgttttcgaaatgaaggagcaaccatgttagcagcatctatccacttatcgcgtggtactccttatatatatatgggtgaagaaatcggaatgcttgatcccgattacagttctatggatgattatgtggatattgagagtttgaatgcctaccaaataatgcttgatgaaggcaagtcacaagaagaggcatttagcattattcgagcgaaatctcgagacaattctcgagtaccaatgcaatgggatgatagtacgaatgcaggtttttctgaaggcgctccatggttgaaagtaggaaaatcatataaagaaatcaatgtcgcaaaggagaaaacagggctgatatttactttctatcaagagttgataaggctacgtaaacaactgccaataatagctgacgggaattataaagcagctttcaaagataatgaaaaagtatatgcttttgaacgccatcttgataaggaaaaacttcttgttttaaataatttctttgctgagaaagttaagataaaattaccggagaattatctccaaggacaagttcttctatcaaattataaggatgttactcttgatgaaacggttactttgcaaccttatcaaactttagctatcttagtgtcataacattttaaaaacctttacttattcaattaagtaaaggtttttaaagtgctgcttgtggaaaggaatcttgctctagattttgcaatttctttcttttttctttactctataacaatagcccaaattcattcaattgatagtagtgccagattgggctcaaatgacctagaaaaatgtaaacggttactataaaataaaaatagaaaggaaaacaaatggttgataataagactgttgtgataatgttggtatttttagctcggaaaaatctttccttgtatgagttaacagtgcaaacaaagttttcaataaaagttatcatagagcaaattaactatctcaatagttttttagcaaaaaatcacctaccagctattgctcactctgctggacgttatcagttattaggagatgaaaaagagcatgataaaattgtctccttattagaagctgagcaattttacctaacccaggaagaaagggtatgtctgatttacctttatagcttttgccgaagagagtttgtctccaatgtgcattatcaagattttttgaaagtaagtaagaatactactttatcagatatcaagatgctacgttctaaattagcaaaaagaggtatctcactcacttatacaagagcaaagggatatagtctagtaggagatgagatggataagcatcaagttgcttttcagatgataactcaactactagaatctcccattggtttttggtctttgaattatatcttgtcttcttggaaattcgctctctcatatgagaagttagaaaagacggtagaatatttctatgaatcttttcaactttctccaatacaagataggcttgagaaatctttatattttatcattttaatactgtgtcgttatcaaaggtcagtagatcgtgttttgcagggttctcctattgtttctgaacaattaaaagagttaacgactattattgtgactaatttaagtcaggatatttccttatctaaaccattagatcagaaagaaaaagattatattaccttgatcttatctggctgttttgaaggtgagggaactaaagatgatgatttctttgaagcattggcaaaagcaatcgttgatgagatggaaactgtttcacttcttaatttttccaataaagaagagttattacaaggtctgaagcgtcatattattccagcttatttccgattgaaatatggtttaactggcgatagtggttatacacaaaatattaaagagcattacagtgatttatttctattggttaaaaaggcactacgtcctttggaagagcaagtaggattaatacccgatagtgaaatttcttacttcgtgattcactttggaggctatcttagacaatcaggtggtacacaatcaatgtcttataaagctttgatactctgtccaaacggcgttagttcatccttagtgattaaggaaaaattgcgtggattatttcctcaaattcattttcatcgtgtctctaaaattgagcagctgaaactgattgacaatcaaacttacgatatggtcttttctactatatttgtagaaacaaaaaaacctaattatctagtttcgctgatgatgacagcagagcaagtacaacagctcaaagaactggttatttcagattttcccaaggcttgccttgacgatttccaacttgatcaattaatagcaactataaaaaaatacgctcatgttcattgtgaagaggaattaaaattggctttgaggacaatggtaaaacaagatatacttagaaaggatgtgaggcccttgttgcaccaacttataacagaggaaacttatcagacaagttctgaacaaatgaattggaaagaggcaattcgtttagcggcaaaacccttgttagcttctggaaaaattacggaaagttacccagaagctatgattgaaaaagtcgaagagtttggtccttttatcaatcttggtaaaggtattgctattccacatgccagaccagaagatggggtaaactctgtcggtatgtcaatgcttgttttggaacagccacgccgtacgcatgaaaactttctcttcatccttttgtgcccggacatcaattttgaaaagattcctttttaaatcaatgatctgcttagcctctttctccaaataattggactaaataatcttccaaatggacagaaatataccgttgtttgcgacgataactgaggtcttttttaggaaataccatcactttgagaaaatataagcacatttttcggataagatttaggttaaatgcggctcttttatccaatgtctgatgatgatcttcatgataaacaacgtccaataaccagtgcatactctctatctgccaatgacctcgtacacaattggcaaatgtgaggacatccggcttaaagctaaagataaaataacgattctcttgactcagctgaccatccttatcaatcgtgttacgagtcatcccaataccacgtaacttatgccatttgggatggttttgacacaaccatttgatatcggaagacacccagtattctctaacttcaatctgtcccctagatttttcaacagtctgataatactgcgcattttcttggagttcttccaataagttgacatcactaaaataaagagcaatatcatcataaagtgtttcttgatttcctttgacggctaagcaatagtctgctttaccttttataatcgtatcaacgatagccgtctgcgtgcccattgcgtctatcgttacaatgcttttacggatatcaattgtccgcaataactgaggaatggcaacaatttcattacttttctcctcaaccgctacctgtcccaaactaagatgatgacccccatcataagccgttacaatatgaacaggcttctgatttttacctcgattgcctcgaatcgttttaccgtccactgaaatcagttgatgaacggcatctaagcttgtcaatgattgctcaaattgaactttaagctcttttaaacggtctgaattaacaagactaatcacacgctctaaggtatcatgagacggacaaccttcactcaaatcaacgtaggtcgcaaacaatggttcattcatttcaataaaatcttccatctccttccaggtttcaatgccagctaactgacaaacaaagacaagaaatagaatggttgataaggggtagcgaattttccaagattgacgactatccaattcaactgcgcaatcatcaatagaaataataaaatcaatcatcgtagtcacctcatctatagtgtactactttgattgattttgtcattatgaatctagttttctgaaaacaaaagtttcttcatgcgtttggcgtgtggaacagcctatttatttattggatgaccccaaacaggaaatttatctcttattatgcatagcagctattgataatgaaacgcatttgaaagctctatcgcatttgacaacaatacttcgtgataataataatgttaaagctttgttagcttcacgtaggtatcaagatattgaaatgattataaaacaggaggattaaagatgttaagaattggaacagcatgtggatcaggtttaggttcaagttttatggtacaaatgaatattgagtctattttgaaggatttgggggtttctgatgttgaagttgaacattatgatttaggtggagcagatccaagtgcagcagatgtttggattgttggtcgtgatttggaggattcagctggtcacctgggggatgttcgtattttaaacagtatcattgatatggatgaattgagagaattagtgacaggtatttgccaagaaaaaggcttaatctaggaggttgatgccatgaaaggtctattggattttttagttaatattgccagcacgccagctattttagtcgccttgatagccattatcggtttagtactgcagaaaaaaggcgttcctgatattgtaaaaggtggaataaaaacatttgttggcttcttagtggtttctggaggtacagggatagtccaaaattccttgaatccatttggaaaaatgtttgaacatgcttttcatttggtgggggtagttcctaataatgaagccattgtagcagtagctcttacgaagtatggctcagcaactgctttgattatgttagcgggaatgatttttaatattttaattgctcgttttacaaaatttaaatatatttttctgacaggacatcatacattgtatatggcttgtatgattgctgttatttttgccgtagcaggctttacttcgttctcgctcatcctttttggaggtctagcgttagggattattatgagcgtatctcctgcatttgtgcaaaaatacatgattcaactgacaggtaatgataaggtggcacttgggcactttggttctttaggctattggttgagtggatttattggtggaattgttggagataaatcaaaatcaacagaagatattaaatttccaaagagtttatcatttttacgtgacagtaccgtaagtattactatctcaatggcaattatttaccttatcgttgcagtgtttgctggtgaggcttatattgcaaaagaaataagtaacggtgtcaatggtcttgtttatgccctccaactagctgggcaatttgcggcaggtgtattcgttattttagcaggtgtacgccttatcctaggtgaaattgtaccagcctttaagggaatctcagaaaaattggttccaaattcaaaaccagccttggattgtccaattgtttacccttatgcacctaatgcagtattgattggttttatctcaagttttgttggtggattggttagtatgatagtcatgattgtgactggcactactgtcattttaccaggggtcgttcctcatttcttctgtggggcaacggcaggtgttatcggtaatgcttctggtggtgtgagaggagcgactattggtgcatttgttcaaggtatcctcatcagtttcttgccgattttcttgatgcctgtactaggtggacttggtttcaaagggtcaacattctcagatgctgattttggtttgaccggtatcattcttggcgctcttaatcatgtcggcggtgcgatagctattgttattggtattgtagttatcttaattggactttttggcatttcatttgttggaaaatcaacccataaggaaggttaataatgacatcaccagaagaaagatattcatctctaagacgatttgcaacggagattcgtttaaatactctagaaacgctaaaccatttaggattcggtcactatgggggtagtttatcaattgttgaggctttggctgttctgtatggtgatattatggatataaatcctgaaaaattcaaagaaagtgatcgggattatatggtcttatcaaaaggacatgctggtccagccttgtatagtacactctatttaaaaggtttttttgataaaacattccttcattcgctcaatacaaacggtaccaaactaccttcgcatcctgaccgcaatttaactcctggtatagatgtaacgacaggctcgttaggtcaaggcattagtattgcaacgggaattgcttatgctcaaaagattgagaattcaagctattatacttatactattgtaggtgatggtgaattaaatgaaggacaatgttgggaggctatacaatttgctgcgcatcatcaactgcaccatttaattgtttttgtagatgataataaaaaacaattagatggtttgacagctgatatttgtaatcctggagactttgttgctaaatttgaagcttttggatttgatgcagtacgtgtaaaaggagatgacattgaggcaattgacaaagctattaaaacttttcaagattcaaatagtgtcagaccaaaatgtattgttttagatagcatcaagggacaaggtgtgaaagagttggaggagttagcttctaatcatcatttacgaccagatttacaacaaaaaacaatgttagagcgagcgttgataagcttgagagaaagtttggaggtggtagaatgagatgttcaaccaaagaaatgaggcttgtctatcgtgatttcctccttcaagctaatcaagaaaataaacaaattaccgttttagaagccgatttgtcgagttcaatgtcaacaaatgcactggcatcagaatttggaaaacgttatattaatctaggtattatggaggctgagatggtaggccttgcagcagggctcgccattaaaggttacaagccataccttcatacttttggtcctttcgcgtcaaggcgtgtctttgatcaagtattcttatcgttaggttactcacaattatcagctacgattattggctcagatgcaggaattagcgcagaaatgaatggcggaactcatatgccttttgaagagttaggtctactaaggttaattcccaaagcgactatttttgaggttagtgatgatattcagtttgaagcaattttaaaacaaacattaagtattgatggcctaaaatacattagaactattcgtaaggcccccactgcagtttatgagggacgcgaagatttttcaaagggttttatacaattacgccagggaaaagatattactcttgtagcaagtggtattatggtttctagagcgatagaagcagccgactacctcaaagaactagggattgaggcctcagttatcgacctttttaaaattaagccccttccagaagaactgaaaccattactgatagatcaatccattgtaactattgagaatcataaccgtattggcggtatcggaagtgcattatgcgaatggcttagtatggagaaagacactactgttagtcgtatgggtattgatgagcgatttggtcaggtaggtcagatggaatatttattagaggagtatggactcgctgttaaagatatagtacagcattgcaaatcaatttataaatcataacaaaaaggcaacattggagttgcctttttgttattttctgaaatttttaagttttgtataagtatcttgtggtattttatccttactaaaaataaaggggtggtcgttatgcgagcttggaaaggtattgttttaattttatctagcatagtggtgacactagtagcatggcaaaatgcaggattaagtgaatttgttgtaccaggattagctttgacaagtttatcgctaacattcctcttatcaaccaaatttaggatacttgaaagttactttcaaggtattgaaaatatgtatttttaccacaaggtaatggctgtattttcaatgattttgcttctattgcacaaaattggtcttggacaaggcggacatggaagtgagtttgcaaagactattggcagtgcgggattatatctttttctaagtattgtttttgtagcttatttcggaaattttttaaagtatgaaatttggcgttttattcatcgctttgtttatttagcttatattttgggattggtacatacttttatgattttaggagataggatactaggaaatactttactcagtttaatcgtattaggttatgctgtcattggggttatatctggattttatattattttcctatattctagaatgcgttttcgtcgtgtagggtacgttcaaaaggttactcatcttaaccatgatacaactgagattgaaatagcaatgaagcgtccttatcgatatgactatggacaatttactttttttaaaatttatcaagctggctttgaatcagcagctcatcctttctcgatatcaggtggtcatgatagagtgatatttttaactgttaaagcttcaggagattatacgaaatccatttacaaacagctaaaagttgggacaaaaatagccttagatagagcttatggtcatatgttatttgataaagacaagaaagaacaggtttggattgcaggaggtatcggcatcactcccttcatttcatttattagagaaaatagtattttgactaagagagttgacttcttttataccttttcaaatcaagacaatttgatttatcaagatatgttagaatcctatgctaaagccaatcctaattttaaacttcacttaaataatagtagcctcaaaggaagacttgattttagtcagtctgtttttgaaggacaaccaacaatatttatgtgtgggccaactagtatgacatctacttatgctaaggtctttcggcaaaaagatgcaaagtctcgtttagtctatgaaggattttcctttagagacagttggttatccatatttctattaaaaacttttgacaaagtttattctaatttgataaaataagagggtctataagacaaaccaactttttcttggttttaggagtgccaatcctaagactcggatgaagcaataaaaggagaatatattatggcaatctcaaaagagaaaaaaaatgaaatcattgctcaatatgcacgacacgaaggtgatacaggatcagttgaagttcaagtagcagttcttacttgggaaatcaaccaccttaacgaccacatcaaacaacacaaaaaagaccacgctacttaccgtggattgatgaaaaaaattggtcaccgtcgtaacttattagcatacctacgtcgtacagatgttaaccgttaccgtgaattgattcaatcacttggacttcgtcgttaatagacaacagagtcaagtaaaaacactagaaaattttctagtgttttttgttttaaacgcactatgaacgtaagtactttgaggaggccagcagtaagaaagtgttttaacctatgaagagggttattaagcaagctaagattaaccctagaaatttattttaatcattgtaacaaggtctgattgctagtattaataatcagactttttacgtttacattaatgaatgataatacagcttcctccacggattttcgctactcaattttatagaattatgttagaataaagcttatacgtggttttatgcaaagttgagtttagaacagctagattgaactttgtaggaaacgcgtaaacaaaaaaatatggagaataatatgtcaaaacaagtctttgaaatgatttttgctggaaaaaaattagttgttgaaactggccaagtggctaaacaagcaaatggatcagttgtcgttcgttatggagattctactgtactcacagcagcagttatgtctaagaaaatgtcaacaggtgattttttcccacttcaagtcaattacgaagaaaaaatgtatgctgctgggaaatttccgggtggctttaacaaacgtgaagggcgtccaagtacggatgctaccttaacagcacgtcttattgatagaccaatccgtccgatgtttgctgagggatttcgtaacgaagtacaggtcatcaatactgttctttcatttgatgaaaatgctagcgcaccaatggctgctatgtttggttcatcattagcattatcgatttccgatattcctttcaatgggccaattgctggagttcaagttgcttatgttgatggtaattttattattaatccgacagcacaagaacaagaggcttctgcgttagaattaacggttgcaggtactaaagaagcgattaacatggttgaatctggagcgaaagaactttcagaagaaatcatgctagaggctcttcttaaaggacatgaggctgtctgtgaattaatcgcctttcaagaagagattgttactgctattggtaaagaaaaagccgaggtagaacttcttcaagttgatccagaacttcaagcagaaattattgctactcataacatagctttacaggctgcagtacaagttgaagagaaaaaggctagagaagcagctacagaagcagttaaagaagtagttataggtgaatatgaggcacgttacgctgaacatgaagaatatgatcgcattatgcgtgatgttgctgaaattttagaacaaatggaacatgcagaagttcgtcgcctcattacagaagataagattcgtcctgatggacgtcgtgtggatgagattcgtccattagacgcagagattgattttttaccacaagttcatggatcaggtctctttacacgaggacaaacccaagcattatcagtattaacgttagcacctatgggtgaagcacaaatcattgatgggctaacaccagagtataagaaacgctttatgcaccactataacttcccacaatattcagttggtgagacgggacgttatggagctgcagggcgtcgtgaaattggtcacggtgctttaggagagcgtgcattagaacaagtccttccaagattggaggagtttccgtatgctatccgactagttgcagaagttttagaatcaaacggttcatcatctcaggcttctatatgtgctggaacgcttgctcttatggcaggtggtgtgcctataaaagctccagttgctggtattgccatggggctcatatcagatggaacaaactatacagtcctcactgatattcaaggattagaagaccattttggcgatatggactttaaagttgcgggtacacgtgaagggattacagcacttcaaatggatattaaaattgaaggtattacccctcaaattttggaagaagctcttgcgcaagctaaaaaagcacgctttgaaattcttgatgtccttcatggagctatcgcagagccacgtccacaattagcaccaacggcacctaagattgatatgataaaaatcgatgttgataagattaaagttgtcatcggtaaaggtggcgaaactatcgataaaatcatcgctgaaacaggtgttaagattgatattgatgaagaaggaaatgtatctatcttctctagtgatcaggctgctattgatcgtacgaaagacattattgcaagtttagtacgtgaagcaaaagtgggagaagtttaccatgctaaagtagttcgtatcgagaaattcggtgcctttgtcaacctctttgataaaacagatgcattggtacatatttcagaaattgcatggacacgtacagcaaatgtagctgatgttcttgaaattggtgaagaagttgatgtgaaagtcatcaaaattgatgataaagggcgagttgatgcttctatgaaagcattgttaccacgtcctccaaaagctgacaatcctaaaaaggaatcttaatatgacaagtacaaacgagttagacattagattgcgtgcttttatcaatgcaccggataattttttagatagtataggtcttgtgaatgccttgcaccactctacggtttgggcaagcaaggaaccctatgctattcaagtagatggtcaagaagttgttcctgtttttacggatattactgaccttaatcatttcaaagaggagcaagaaagtgctcgagatatgttttgggagagtcgtcgtagtttagacgttcttgatgaagctatttcacatggcttagcaggattggtctataatttaaaaaaagaaggcgattttgggaactcgactattttctactgtgaagatatggtgcaatttatgaataattacaccacaatcttaaatcagttgttaaatgaagataacattgttgccgatatcatggataaaacctacttggtacctgcctttgtccatccacgtgaagaaggtagttttgaccgtcttttccctacaatgtctacccccgaaggaaaaagttatgttccagtattctcaaaccttttaagttttgaaaaatggtataaccataatgattttggtggtgcttttaggaaagcacaaggagtaattttagcctggacgattgacgatatttataaaccgcgtaatggagaaaatgagattgatgatacctttggagtagccatcaatccatttgatgaacaacaagttttagttgattggtctgatgtagaaaacgattgaggataactatggggtggtggaaagaaagtatagctattgtcaaagaacaagatccagctgctcgtagttctctagaagttattttaacttatccaggaataaaagctcttgcagctcataggctatctcattttttatggaatcataattttaaattgttagcacgtatgcacagtcaattttggcgtttctggacacaaattgaaattcatcccggagcgacgatttcggaaggggtttttattgaccacggttcaggattggtcattggagaaactgccattgtagagaaaggtgctatgctataccatggggttacattgggtggcacaggtaaagacaaaggcaaacgacacccaaccatacgtaaaggagcgctaatttcagcacattctcaaatcattggtccaattgaggttggagaaaatgctaaagtcggtgctgcagcagttgtccttgcagatgtgccagcagacgtaacagtagttggtgttccagctaaagttgtccgtgtccatggtcaaaaggatgatcttcaaatccgaagtattgaacatgatcgagaagaaagttattattcgtccaaactttaggaggtatttgtgaaggattatgtaacaactcaaatattatcaatcttaggtatactagcagcagcttgtttaagctatttaaagtttgcacaaggtaaccctctcttaggaattatttgggctgcttttgttttaatgtatgttgttcgtttgtataaagcttatcaaaaacagaaaaaggaaaaaccatgataaaaatttacgacactatgactcgcagtttacaagattttatacctctcaatgaaggtaaagtcaacatgtacgtctgtgggccaacagtttataactatatacacatcgggaatgcccgcagtgtagtagcttttgatactattcgtcgttattttgagtattgtggttaccaagtcaattatatttctaactttactgatgttgatgataaaattataaaaggtgcagctgaagcaggtatggatacaaaatccttttcagataagtttatttcagcatttatggaagatgttgctgcattaggtgtcaaacctgctacaaaaaatcctcgagttattgactatatggatgagattattgattttgttaaagttttagttgataaggaatttgcctatgaagctaatggagatgtttattttagagtaagtaaatcacatcattatgcaaaattagccaataaaactttggaagatttagagattggtgcaagtggtcgtgttgatggtgaaggagagattaaagagaatcctttagattttgcactttggaaatcagctaaatctggggaagtctcatgggaaagtccttgggggaaagggcgcccagggtggcatattgaatgttctgttatggcaactgagatccttggtgatactattgatatccatggtggaggagctgatttagaatttccacatcacacgaatgagattgcacaatctgaagctaaaacaggtaagacctttgcaaattactggatgcataatggttttgttaacgttgataacgagaaaatgtctaaatctcttggtaactttattactgttcacgatatgttgaagagcgttgacggacaagtaatacgttttttcttagcgacacaacagtatcgtaaacccgtgaatttcactgaaaaggccgttcatgatgcggaagttaaccttaaatatttaaaaaatactttcaacttaccaatccaagagaatgctaatgatgaagaattagagcaatttgtgaaagcatttcaaggagcgatggatgatgattttaatacagcaaacggtattactgttatctttgaaatggcaaaatggattaattcaggacactatacttcaagagttaaggaaacctttgctgaattattagaaatttttggtattgtattccaagaggaagttcttgatgctgatattgaatctttaatagaacaacgtcaagaagcacgagctaatcgtgattttgcaactgctgatcgtattagagatgaattagcaaaacaaggaattaaattgttagatactaaggatggcgtgaggtggactcgtgattgatgttcgtttgattaatggtattgctttagcttttgaaggagatgcagtttattctttgtatatccgacgccatttaattatgcagggttttaccaaacctaatcagttacatcggaaagcaacccaatatgtttctgctaatgcccaagcattgttaattaatgccatgttagaagaaaatattttaactgatgaagagcagttaatttataaacgaggacgtaatgcgaatagtcatacaaaagctaaaaatgctgatattattacctatcgtatgtctacaggttttgaggctcttatggggtacttggatatgactggtcagataaagcgcttggaaactctaatacagtggtgtattgaaaccattgaaaaataaacaaaaagagaggctatatcctctcttttttatagagacattaggatttgttggtaaaatattgctataaaaagctttatgctatagcattcatgatataatatgactatgaaagataaacaatttaaagaagaatcaagtgaccttgtctatggcttacatgctgtgacagagagtttaagagctaatactggtaataaattatacttgcaagatgacttaagaggaaagaacgttgataaagtcaaagcactagcgactgaaaaaaaagtatccatttcctggactcctaaaaaaaccttatcagacatgacaaatggtggagttcaccaaggattcgttctaaaagtttcggaatttgcctatgcggatttatcagagataatgacaaaggcagagaatgaagaaaatcctctcattttaatccttgatggtctgaccgaccctcacaacctaggttctattctacgcacagctgatgcaaccaatgtaacaggtattatcatccccaaacatcgttctgttggagtgaccccagtggtttcaaagacatctacaggagctgttgaacatgttcctattgcaagggtaactaatctcagtcaaactttggatactttaaaagataaggagttctggatatttggcactgatatgaatgggacaccatcgcataagtggaataccaaaggtaaattagccctagttattggtaatgaaggaaaaggtatttctcataatatcaaaaagcaagtagatgaaatgattacaattcccatgaatggtcatgttcagagtttaaatgccagtgtcgcagccgctattttgatgtatgaagtatttagaaaccgcctatgaaaaaacattctatcttactcgttgatggctacaatatgattgctttttggaaagatactcgacagctttttaaaagcaatcgtttagaagaggcaagggaagtattacttagaaagctaaatcattacgcacatttcgaacacattgatattatttgtgtatttgatgcacagtatgttcctggtgtacgtcaacgttatgaccaatacaaaatatccgttatctttactgaggaggacgaaactgcggatagctatattgaacgagcagcggcagaacttaatcaatctgtgttaaatttagtctccgttgctaccagtgatttaaatgaacaatggactatattttctcagggtgctttacgtgtctcggctagagaattggaacagcgtgtagcgacagtaaaatcagatttggataagatgtccagtcaaatcgatttgagtacgccaaagttaaggccgtggaatgatgaacaactaggaaaactcaaggattttttagatggtatgtaaaacctaacactttattagccagccaacaatttttttgatataatattggaactactttgattatcaaataaaaataatagattgaggtaacaatgacttttaaaatactaacggattcgacatcggatttagatgaaaagtgggctcaagagcacaatgtcgatattataggtttaaccattgaacttgatggaaagacttatgagacagtcggagacgaaaaaattactagtgacttcttgttggagcgtatgcaagagggagcaaagcctacaacaagccaaattaacgttggtcagtttgaagaagttttttcaacctatgcagaaaatgaccatgccttgttatatttagcgctatcttcacatttatcaggcacttaccagagtgcaactattgcgcgtgagatggtcttagacaaatatcctgatgctcaaattgagattgtggatacgatggcagcttcatgtggtgagggtgtcttagcgatgttagcaactaaagagcgacaagaaggtaaatctttagaagaagtgaaacaaaaaattgaatcacttctccctaaattaaacacatactttttagttgacgatctcaaccatttaatgcgtagtggtcgcttatcaaaaggtgcagctatcattggaagtgttgctaagattaaaccattacttaagttagatagtgagggtaaattagtaccatttgccaagacaaggggccgtaaaaaaggtattaaagagattgtgactcaggcaacaaaaacactatcttatagcactttaattattgcttatagtggagagaaagattcagctcaagttatgaaagaacagttattagcagatgagcgtattgaagaagttattattcgtccattagggccagttatttcagctcatgtgggctcaggtgctttagctctattctctttaggggaagaaaaccgataacaaatcaaagggcataacagtacgttatgttcttttagtatacattttataaaatgtattttatatgatgctatgaaactataaaatagtaggagacctattataaaaaataaaataagaactatcctcaatatgataaacgacaacaacaattggttttacaaagttatcaaaaatgtttttagacgatggtttttatcttatggcttgaaagtgtttttggaaagctaataaggggagtgtgttacctgattttataataatattaactttatttagtggtatttctattttgttacgacttctaatctaaaaagcgtctctccgtttgttgatgaaagtttttggaaaatgtttttgttgctggcgcatttgccctcataggaataactattttattgatgcttttactaggaaggttgatattgctacttatttttcaaggggagatgatgcaattttagcagttataggaatatcattgatagctatgggaatttcagtgtactaccataagtataaggacagatagtaatatgaaaaatttacgcttaaagacggctagagctagtatggatttattataacagtctctagctgaaaaggtcggtgtatcatgtcagacaatagccgccattgaaaaaggagactataattaagcgattaaattgtgtcaagctttgaataaaactgtagatgatttattttgggatgaaaattgataaaataaaagaaataacttgacgaatgctaccttattttgatatgattataagcggtattgtttaccccatttgtaaggccccggaacctttcaaatactctcgtggaccggaacatccacacctgtaaacaaaaacgaattcgtataggagaaatcatgaacaaaacaactttcatggctaaaccaggccaagttgaacgcaaatggtacgttgttgacgcagcagatgtacctcttggacgtctttctgcagtagttgctagcgtacttcgcggaaaaaacaaaccaactttcacaccacacactgatacaggtgactttgtgattgttatcaatgctgaaaaagttaaattaactggtaaaaaagcgtcagataaaatctactacactcactcaatgtatccaggtggtttgaaacaaatctcagcaggtgaacttcgttctaaaaatgctgttcgtttgattgaaaaatcagttaaaggcatgcttccacataacactcttggacgtgcacaaggtatgaaattgaaagtatttgttggcggtgagcatacacatgctgcacaacaaccagaagtacttgatatctcaggacttatctaagaggaaaggagcattatataatggcacaagcacaatatgcaggtactggtcgccgtaaaaacgctgttgcacgcgttcgtttggtcccaggtactggtaaaattacaatcaataaaaaagatgtagaagagtacatcccacacgcagaccttcgtcttgttatcaaccaacctttcgcagttacttcaactcaaggttcatacgatgtttttgttaacgttgtaggtggtggatatgcaggtcaatcaggtgcgatccgtcatggtatctcacgtgcacttttagaagttgacccagatttccgcgattcattgaaacgtgctggacttcttacacgtgacgcacgtatggttgaacgtaaaaaaccaggtcttaagaaagctcgtaaagctagtcagttctcaaagcgttaaaaactgctttacatcaacgattacaagcattttgcaagtctcttgcaaggtgctttttttgtcgttttttgcttttgataccttttttgataccgtttcggaaaaacttctccatcttttttgactgttattttgcttttagatagtccgcaaattgtttgactgacctatcttctccagtagttgtcgaatgactgtaagtatctaaggtcatttgactacttgcatgccccagtctttttgctgtgttgactgggtcaactccaatctcaatcatcaaggtagcatgagtatgtctaaaaccatgaggactgattttctttaacccgtgttttctgataatccgtgataggacgttgttgatatagtctgcatgtagtggctcaatagagcctgaccgtgtacaataagtgaagagaaaatcttgctcgatagaaagaggtgcaactgctagttgtgccttttctttttggctgatggatttccattcttgcagaatagaaatagtttcgctatctagcttaatctttcttactgagaaatcatttttagtgcctttttcgattgcctgtccgtctaatcgtcctaagctcttatcgacacttagtgtctcagtttgaaagtctatatctgcccacttaagagcgtatagctcgcctttccttaagccactgtaagctagtaatctaaatagtgcatagtgtttgtaaggctcttcctgaaggacaatggctaggaactcctgaagttcttgaaccgtccaatagttttctatccgtgtctttttccgttttggcataatgatttctgccatagggttatgcttaagcagtttcatcttgatagcaaaatcaaagaccttcccagtataggacttgatttgcttgatattcttaaaggtctttgctttatctgtgatgaagttctggcagtctaaaggggagattttgctgatgggtaagtctcccataactggcagaatgtgaagtcgaaacatatcaagagtacgtgaagcagttgttggctctaccatatcttgataggcttgataccatttctcgaatatctcgttataagttttatgagttggtttgatgaactcttccaactttcctgaagccttaagataaatgagtctggcttcgtagtctttggcttcctttcgagtacgaaagccacgtttgatatggtctgcacgttgactgtctttgaccatatagattttgacaaaatacaaatagccatttttggcttttttgcttgggtatttgtgaatggacattgtaatttctcctttatttttctaaggtttcggagcttataaaataaagaaattacgttgcctattatttttttaaaagttctaatctctcttttacttctttatcaagagtttttcgaagatttttagcctctgcttcaagttcatcaattttctggttaagcttgattttttcttgcttaatttcctcaagtctgtcacgtatgggagagttgaaaagagtttttttgctaactttttcaagggtttcaagagtagaaaaataatcttgacccatatcctttttgacttgttcaaaaaaacttaataaatttgtatctttgattgttgaatttgctatttttgaattgttatcaagccctagtaagtaagggatagatacaccgaaaaaatcagctaatattttagaattttctatgctaagactagtttttccgttttcatattttccatattgagattgattagtattgatgactttagctagatcagcctgagttaaccctttgtcttttcgtagttcttttagtctattgtacattattccctcatgacttttattgttttatataaagcattatatcacaaataatcaaaatttaacttttttcttgacataagttattttttaacttaaaataatagttataaaataactttttcggagtttataaaatagagaaaggggtcagttatggcttacacactagaagaacgagaaacgattgtccgttatgatgaaatggataactgttggtattttgagagtaatgttaggaaacacattactaaaatcatgaaaactattgatagttgtcagattttaggtcaagagaaagaagacgaccgcattatatggattcatgctaaattgacaaatcttgatgattatatggtttctccatttgttcgaaaacgagttaaacgtgaaatgactgaagaacaacgagaggaagcaagaaaaagaatggcaagattacattctaagtctgaaatatgattctacaatcacaaataacagattaaaaaccttctcaggtatatttaccctaggaagatatttaaattctgaaatacttgattacaataagcgtttcagagcttaaaatcgattttaacaaaaaggagaactcaaaatgacagaaggatttaccattcagctccccaaagtaactgaaaagaagttactggctcgctatgacactatggttcaaaaagcaatagaaaaagcccttgaggacaaagagctatataagcctatggttcgtatggctggcttgtgccgttttttagatgtctcaacgacaactattgtcaaatggcaaaaggcaggcatgccacatatggttattgacggagtgactctgtacgataagcgcaaggtcgctcaatggctacaacaatttgaaagataggaaatttggcatggataaaaataatttagaagacttgacaggaaaaaagatacttagaaatggttttggtggtcttcgtttggaatatgggacaatctttcttgatgttggattgttcacttatattgtgctgatactatcaatatttttctttttagttgaacgttggtttttgggagctttaacttttgtgttgcatgttcccttgcttctacttgggatatggtgtggagagagataggaggtaagaactatggactatgataacgacagctatcttatcccgaaagttttactgcaagatgatttctacagtagtctatctgcgagagatattttagtctatgctgtcttgaaagatagacagatagaagctcctgaaaaaggttggatagatactgatggcagtatatatctaaattttaaactgattgaattagctaaaatgttttcttgcagcagaacgacaatgatagatattatgcaacgactggaagaagttaatttgattgaacgagaaagagtagatgttttttatggctactctttaccctacaaaacctatatcaacgaggtataagcaatgataaagatttattttggaaaagatataacacttaaccaagctattcagtcgcgattggatagctatcagattgactatcaagcattctcaagcaaagatatagatgctaaaacactgatggaatggctattcaggtcgaccgatatatttgaattactaagcactaagatgttgaaatacaagctgaatacacaaattaccctcagtcaatttgttcgaaagattttaaaagatgtcaatagcaccttgaagcttcccattgttgtgacagatgaggttatttattcgaacatgtcccctgactatgtgacagtactcttgccaaaagaatatcggaaaattaaaagaattcagctgatgaggaagatggagcagttagatgagggacgtctattctggaaaaactttgagtcactacgtaagcaatctgagctacgttggtttgaactgaatgagttactgtttgctgatatgtccgacgatttaggagaaatcaaaaaagctaaagaccgtttctttagctacaagaaaaataaacaggttccgcctgatgacattatcgaaaaaatcctcaagatatttttggttgaccgagaagactttttcaaaaaatctgtgttggattgacaaaatttctagtcaaaaatatttatgaaaataactatgaaaatattttgaaaacagagatttgaggtcagatttattggggttctgaaaaatttataacagggcgccctctaacagcccgctatgtgcacatctgaagtgcatttactacacccgttttttggcaagtttggctggagcaaaatgaaaatggtccgactccgaaggggtcggcttggggctactcccccaagaatgtcattttacgtaggcctttgcgcagacaaaaaaatcggcgccgttaggcgaccgccaaaaagaaaggaggtttgtttgaaattaaaagtcagcttagacaatatcactatgacagcctatatcaaatctaaaaagtatttagctatgaaacaactcatagaaacccatttagctattactgttcaaactgcgatgactgacatgtttcgagccaccactggggatggaatccacgttgtgctccatatgaattatgacaaacaaaaaggacaagaccgcaaggctcgtccatttcgcttggagtttaatcccaataaactccgtttagttgacagtgaaattatagatactattataccatttcttgaagatatttcaatatcacgtgctgatttagcttttgatctatttgaggttgattgtagtgagtttgtgctcgaaaaaaagggcagaccaaccgcaaccaaggaatttcgttctagtactggaacgttagaaacaaaatatctaggtgctccacgttctgaaaaacaagttaggctatataacaagaaaaaggaacaactccaaaatggtactgataaagataaagactttgcaagtcaatttaagcactggtggcgcttggaatttcaattaagaagccgttcaattgatgagatattcgaggttattgatactattatttttaaaccattcaatcttaaaggcttatctattgagacccaaatctatctaactgctcttattcacgataaaaatatctggaaaaaactccatagaaatacaagagcaagatacaaaaaaattttagaaactcatcaaacatcagatactgattatttaggtttgctgaaagacttgttgaagcatgaaagaccaagactagaaaatcagctcgcttattatgggggtaggatagacaaaaatagctttcaacccttttgttgaaaattcagtattatcaaggagttacgaggtcaaaaatgagaataaaagattatgctgatagtctaggagttagtagccaatctatctataaacgcatacgctctccaaaatataaagaaaggttgaaaggtcatttataccgagacaaccaaaaggttgaaaatcttgatttgataggcattaaaatacttgaagattatcattttgagaatgatgtcattgaactggaaaaaacgctgggtgatattcaagaagaattcgagcaagaaaagaagggaatgcaatatcggatagatagactagctgataagttaactcctttacttgaggataaccaaaacttggtacaaaaaaattatgagttactcaactatgttcggagcttggaacgacagaagctattgctgattattgctttagctgtcatggtaatcactttattagtggcaatatggcttgccatcttttgatggcaattgtcggacaatgcgaagcgtccgaccaagggcactgcttaagtgctctactcgcttcggcgagtataatcgaagctcctcttgtggctcgagaggtggttcgaagtcgctcctgtattcggagcgaagagctgtctgcaagacccttcggagaacgcacatttacgtagtaaagtgtagtgcgttacactttacatggaagttatgccgatcccctaagaagaaatccagataataggttgcttattcatggtggcaattaccgccaccatctcggcgaccttttgagccgagaaaggagaattaaaaatgagttatgttgttgctagaatggctaagtacaagtcaggtcagttgacggctatttataatcataatgaacggatttttaaaaatcactcaaataaagaaattgacgttgagaaatctcaccttaattatgaactgacaaatcgagaccaggcacaaaattatcacaaacaaataaaggagcacatcaatgaaaatcgcttatctactcgtggagtccgtaaagatgctatactctgtaacgaatggattattacttcagataaaacgttttttgactcgttagatgagaaacagacacgagagttttttgagacagctaaagattattttgctgaaaaatatggtgatgctaatattgcttacgctagagttcaccttgatgaaagtactccgcatatgcatttaggtatcgtgccaatgaaaaatggtaagttaagttcaaaagcactgtttggaaataaagagaaacttgtagcaatccaagatgaacttcccaagtaccttaatgagcatggctttaacctacaacgtggcgaaataggcagtaagaaaaaacatttggaaactgctgaatttaaagaaaaacaacgattactggataacgctgatagaaaactagctgataaacatgaagaattgaaagcacttgatgataagatttcaaatgttaacgatacaatagctgataaagaaagtaggcttaaagaattggaagcgaaagaatgggatgctgttggcgatttgaagcagtatgaattagagaaacagtcactagctgaaagcattgaagacataaaagacattgaactattacaacttgatagaattcaaaaagaagatttggtaaaacaaagctttgatggcaaattgaagatggataaagaaacctataatagactatttcaaactgcttcgaaacatgcatctagtaatgctgagttaaaaagagacttggttaaagcccagtcgcagaacaatcacctttctagagaattactcaatcaccgtaagacagctgaaaaaaatatcaaattaagtcaagaaaacagaaaattaaaggacaaagtaaaaatgcttgatgaacaagtgaaaattctgaataaaagcctctctgtttggaaagaaaaagctaaagaatttatgcctaaacaggtttatagagaaacattatcaatcataaacactctaaatcctattggtttagctaaaacagcaatcagacaagttaagaagatggttgatagtaatagttagctacttttatgccgtgaaagtctcttgataacaagctaggcaagtttagactagatggggtcgagtcgtcaggctaaagaactggcgaccgatcgccatagactaaaacagtctaggttacttgttgtcaagagaaccatggaataaatgagtaaggagaaattaaaatgacagataaaaaaattgtttattactttgaccatgacttatcaaaaaaagatatgggaggagtaggacctacctacaccggtaaaaatcttttattcctactttggtggacatattcttatgtggcagaagacaatttagacattgatacgtcattgtttgaagtcccagaattcaatgatttttacaataatggtctagagctttatcgtataaaaaatgaactagctaattacaatatcagatttggatatgaggttaatccaaaagatagtacaaagatgctgataggtattttgccaactgatgaagaagattatgttaagggatatagaaattttattgctgatatttccaatcctgacacacgttacgcaatctatcatcgactaattaaaaccatggacacaatgctaccgattgaacaaattaatgtttataaaagccttgcaaaaggtaataaaaagtgatagagtggaagaaagttgagactgagtttgaattggtaacaattcattcaaaaaatacttattgaaggtattaggtagaggtgttgcctcctgagtatacttaggtaaatccccgattgggttctcagcttttacattaggagaaggttgattgactggtaacagttttctcaaaggtattgtttgtcaatacagggttggctctgccttgtggaatatctactaaacagcccgaactaattttgctcctagttaatttgtaatcttcaaaaagccttggtattacgctaaggctttttgattgctatttaaacaatttcatatagtcgcttcgagtaggaagcaagtaatcaataacgaccctattctcttcctcctcgatatggtataggacaatataatctttacttaaggtataacctctagtgctgtggtacttactgatttttgaaccatatttttcatcggcatcaaaaccaacttcagggaaaacctcgagtttttctatgtcactaatgatttgctccattttgtgctgacctgatgtcgaggaatagttttgagaaatataatcacgaatttcctttaacttctctaaaacatcaggagcatagataatctgatatttcttatagtccaagttcagacctcacttcttcagaggtataaaatttcccttgacgaacatcttcaatatttttgttgatttcagcttgaaattgcttgaaaagtttttctttctctagctcctcttccgtcaataagtcaacctcatttgtgacaacgacattttgaaggaataatcttaaagcagatgataaggttaaatttttcttgtttaatactgtcattgcttcgcttaccaattctttgttagcttggaatgtgacagctctatttttttctgctgtaaccatattatgtaactcctttatttagtttatttaattatctcatatacataaaaaaagtcaataaaaaaatcccaattgattgagatagctttcgtttattttataagctccgaaactacagaaaattgatacctttttgataccgtttaggtttaaatatttgtctataaataagaatttcagtgattttttattttagaaacgttgattttaaagggatttgactttaaataatggagtgaaccaaaaaccaggtcttaagaaagctcgtaaagcttcacaattctcaaaatgttaatcagtacgattatatcaacgtttcaaagcactttgcaagtcttgcaaggtgttttttaaaaccttttgataaccctttctgttttgaaagtaaggtaaatgtaatataaatcgctgtttgtatttttaatagattaacctattatgagttttatctgtgtaaggaacatctaaatatgctatactgcagttaaaaaaatagggagcaaatgatgtcacaaattaaactaacacctgaagaactccgtatttcagcacaaaaatatacaacaggatcacaatcaattacagatgtgttaacagttttgactcaagaacaagctgttattgatgaaaattgggatggtacagcatttgatagctttgaagcccaattcaatgaattatctccaaaaatcacacaatttgcacaattattagaagatataaatcaacaattattgaaagttgcggatgttgtcgaacaaacagactcagatattgcctcacaaattaataaataattggcttattcaaattcataagtttaacttaggaaggcataagctctcctaagttgatatattatagctagatgatgtaattgtttcataaaggagtaaaaatgaaaaagagtacccaaataatactactaatagttgcattattcatacttgtttttagcggaggattttatatgaaagaacaacaaagaaaagaagaactaaaacggaatcgagaatatgaagttagtctagtcaaagcattgaaaaattcctatgagaatatagaagaaataaaaatcacacatcctgtttcaactgaaattcctggagattggcattgtactgtaaagatttcatttaatgataaaaaatctattgtttataatattacacataatttggaatcgaaaaaaaattatagcggaaaatttaatgaaaaaaatatgaatttttttgattcaagaattggtaaaacaaaaaaaactataaaaattattttttcagatggtcaggagaagatacaataatggtatttacatataccgagaaagaacttcgtgaattcaatattggagataatgtatattcagttaaccccgattatgcagaaaaaaatcattcaactgtcataacggatttaccccagaaagataacgaaacaaatattattacaacagaagatagaaaaaaatttaaggtattaaaaacttctcctgacgatatgtctggctatcagggtatggcagttgcaccaattatcaagggtaaagtagattataacagtgttgcagttatatccgccgcaacggattcaagtaattataaagatttaattggcgcagtttcatctgctcaaccacatcaaagttcgactcagttaaaatcagctgataaatttttaaaagacgtacagtcacatgacaaatggactgtgactcagctttcaggctattctcaatctgcatatatgttaaaattaggtgctcaatatcatatcccgactacagtatttaatggatggtttaggtatagcactttaaatgaagatgaaaaaaattcatggctaagcatcctgaatattttgtgaattttcgacataaagaggataatgtaacttggtggaacgattttaataaactagatgataaagattatggtaccgtgaaatgggtaaatggtaaaagtcataaaatagagagttggaaatttactgatgatggtaagttaaaagatgaaaaaggtaacatcgtaaatcctaagtcaccagctgttcagtctgttctttatgaagaagttcattttcaaaaagctaaagctaaattaaaaaaatctggaggcaaacttagtcatagtgaaaaagtatatttagattctgaacaggctatatttattgctaacggtttaaccacggcatctcaaacagcttctgatgatatcaagaagaatgctgaattagttaaagaaaaagcatcagaactatttgcaaaaactaaagtgatgcctcctggtataacagatttaagtccggaagaattagctgatacatatagtgagggcggagttagagaggacaccatagtaacaccaattgaaactttctttgatgaaaaagttactaatgcacaagagattacaacttcatatattaatcttcaaaaacaaattgaatctggtgtccaaaaattgctagaagaggactccaaattagcaggagaatttaaggaatggtcacagtactagatcaaaatgaaaacaaaattaatagtctaaaaataaacctagggaaattggaagataattatcatcgcgaaaatatggagatagaagataaattatatagccttgaggataaaaagaacgagttagagacttatttacaagaagtctatgaagagacaagtcaccttttgagacaaaatgattcagatggttcgacttttatgagtttaaatcgaataattgaaagttatcaaatggaattaattgatgaatatgaaaactataaacagactatcattgtccaagaggaaaatagtcggacacagtttctaaaagaccgagtaaaattagaaaatgacatttctagtttagaaggaagaaaatactactaattcagatggactataaagtgaaagaggcaataaatgagtttaataggcgctgtattgaaaggaaccaaagaagacaaagaattcaaaaagcaaattcaaagagctttagtaaggattgtctatgcccctgaaatagtagaagaagctgattctattaagatgacttatagtgacaagattgataatgtttctgagacggccaaatcatcaattaaaacgatagcaaatcaaatagattcaggacttgtaggacaatttggggaaaaagtaaaggcacaggtagatttaaataaaggtagttatgatgatttataatcgagtgaaaatgttgaggaagcttactatcctgatagttattatagatatgaaaataatcaagttggattagaagacataacattttacatgaaggataacaaagtttattatttacattttggtaaagcaatagataaaaatgaagctaaaaatgataagtatctcaatcaaattataaataattaatttctttattttataagccccgaaaacaaattttttgataaccttttgataacccctccgcgaacatattgtaatacatagtgcacttttgggatataaattgttgatttttagctagtttataccatataacaccatatattacagttgtcagagaaaaccaggtttaaaaaaagcccgtaaagcatcacaatcctcaaaacgttaatatatacctatatatcagcgattggaagcacttcatggttcacaccatggggtgttttttgtgtaatattcaaaaattgtcctaaagtcatttttaaaacttctaaatacttgagaaaccattgtaaatttaaataactactttaaatagcacaaaggcaatgacaaagttagatgagatgattctattttaatttataattgaaaaaaagagtatatgatggaggaattttgtatggtaagtactcaatatatgaaagtaaccttacgagaaaaattcccagataaattaacatatgttgatttagaagaacttgtgatatgatattacaaataaaagaaaatgactatatatcagctcatatattggttaaagttggtaaatataaattattgaaattacctcataagtttaccaatgagattacggttagaaaggaatactaatgtttaaatatgtccctatttttagggaatttcgacttaatcgacagttttctcttaaacaggttgcttcaaatgaactttctgtttctcagttatcacgatttgagaggggtgaatcagatttatcattaacaaaatttttaggggctttagaggcaattgatttatcaattagcgaatttatggatagagtaaataaatatcaaaaatctgatcagatatctttaatgtctcagatggctcaatatcattatcaaagagacgtagctgggttagaaaagatgatttctgtggaagaaggtaaactaaaaaaggatagttcagatatacgttgtcgtttaaacatagttctttttagaggaatgatatgtgaatgtgactcctcaagaaaaatgtcggaagaagacctttgctttttgtcggattacctctttcaaaaggatagttgggaaattagtgactatattttgattggaaatctttaccggtattacaacacaaggcatatttgccaacttgttaaagaggttatcaatcaaaaggaatattatcgagatatttatacaaaccgcaatgttgtcgaagcaaccctcctaaatgtggtagagacactaatagaacggcgcgctctagaagaagcaacgttttttctagagaaagttgaagcacttttaaataatgagcggaatgcttatcaccgtattattttactctatgaaaaaggatttcttgcctatgctaaaggggatagtcgaggaatacaaagcatgaagcaagctattttttgcttccaagcaattggttctaaacatcatgttgaaaattttcaggaacactttaatagggtaacaagattataaaaaatcccatttatgggattttttaatatttctccttttggtttgctataatgtcgaactaaggagggaattatgaatattaatggtataaaattactatctagtcgagcagtcagtaaacttggtgatgtgttttatgattatggaaatagtacttggattgcttcgatgggtggtctaggacaaaagattttaggtatttatcagatagtagagttgttggtttctattgtcctcaacccttttggaggcgccttagctgatcgctttcaacgaagaaaaattttactaataacagatgctatctgtgctatcatgtgtttcttactttcttttattggagatgataaagtaatggtgtatggtctaatagttgctaatgctatcttagcggtttccaatgctttttcttctccggcttataaatcttatattcctgaaatagtagataaagctgatatcattacctataatgctaatctggaaaccattgtgcaaattattagtgtaagttcccctgttttaggtttccttatttttaataattttggtattaggattactttaattgttgatgcgattacttttttgatctctttcctgtttctttatgctattaaagtggaaagggtacagctttcaaaacaagaaaaggtagcgataaaaaatattttagctgatattgcagatggatttacttacatcaaaaaagaaaaagaaattatgttttttctaattattgctgctttattaaacactttcctagcaatgttcaattatcttttaccttttactaactccctattaaaaacttcaggtgcttatgcaacaatacttagtatatcagctatcggatcaattattggagcgcttattgctagaaaaattaaatctagtattaattctatgctatctatgctagtattcagtagtttgggagtcatagttatgggattcccatctctatttgaattaccgatatggataccttacagtggtagttttctttttaatagtcttctgacaatgtttaatattcattttttcagtcaggtacaaatcagggtcgatgaagcgtatatggggcgtgtgatgtcgactatatttactattgctattatgtttatgcctataggaacactatttatgactatcttttcatttgccttatcaaatgttagctttattgttataggatgtgccattgctatattgggaggattaggatttagctatagtaaaaaacaattttagaacttaagaaattattctgaaacatcaaaaaaacttgtctctactgacaagtttttaatagttattttcttggttcaagcatgcgttggataccgcctaggattaaatcagagaaaattgccataagggctgttggaagagatcctgctaagataatagcaccaccatttgttgcattagttcctcttatgatgatatctccaagtccgcctcccccgacgaaagcaccaatggctgtaataccaattgctacaacaagggcatttctaagtccagccatgataacggaaatagatagtggtaactcaaccataaataaacgttgacgcttagtcatgcccattcctttagcagcatctagtaagtcggagtcaacatttctaataccagtgtaagtatttgtgatgattggcagaagagaataaagaaagacagttgcaactactgttttaatacctagccctagacctaacataatgatagagatcatagctaaagaaggaatggtttggatgacatttgcgattcccataacaaaggttttaattttaccacgtctagcgatgaagatacctagagggataccaacaattgcagctaaaataacgccgtaaactgaaattaaaaagtggtggataaattgttctaagatataactaccattatgttggaagtagtagataaattgttggaaagtattcatttgtttcatttatttatctcctctaaaataatggtttttttctaaaaattgtttggcaacaactgaaggttctaaaagtttatcatctaccatataattaaggttttgcatcgtttttaaattgattttaccatcgagtcgatggagtaatttttttagtttaggatcttttttgatgatagaattgttgacaaccatagaggcttcataaggaggaaagaattttttatcatcccttaaaatttctaaatcatagctcgaaatacgaccgtcagtggagtagcctaatacagattgcattttgttactttcaaccgcatcatagactaagccaatttgcatagggtaaatatgtgaaaattcaaaaccgtatgttttagcgaaatcagtgtatccatctccctcgcgattcatccatgaactatcaacccctgccttcatagttgttgataattttttaagatcagagatcttagtgattttattctgtctggcaaactctttagtaaccatgaatgcataagtatcagaaaaaccataagtaggataccaagtttgattgtagcgtttttggaattcagtttttacaatcttagaagcttctttagggtctttaacagcttttaaaccaagagtccctgtgatgtctgttcctgtataacgtgtggcagcaatgtcagcatcaccacggagcaaagcttggtgagtaaccgtagaggaaccaagattgcttattaaagttgtgttgtatcctaattcgtgatgaattaattcggtgataatatttgccataatactagactctgtagaactttgggcagcaaccttaattgtggtatgaccagactttttagtatcggttaattgacaaccagaaatcgttaagagggctaagcaaagtgtaaatatctgtaaaaagtgcgattttttaagcatatctaagcctcccttcttgttgttctgggcgttagagctgtttccagtaatcctaaaagataatctataataagtgacaggataataacaggaattgtgccccctagaattaatttggactgaaaaagatttaacccgctaaaaatgagatcaccaagtccacctgcacctatataagaagccaatgtagcccaagcaataacataaatagtagacaagcgaataccagccataataattggagtagctaaaggtaactcaacttgaaatatagattgaataggtttcattcccatccctttagcacaatctttaagtgttggattgacattattcatacctatataagtattccttagtataggaagcaaggaataaataaataaagcaacgatagctgggatttttccaattccaaacaatggaatcattaaagctaataaggctaaacttggtatagtttgtaacatgctagctatagcaatgataattttggctactttgggaaaacgtgttaagaccacacccaatggaacagcaattgcaatcccaagtgctatagcaaagaatgagatatagacttgttcccatgtttttactaatatttgcatgccatactgtgataagaaattgaccattattgatcctccgtttcagtatcgccccaaataatatcgtataacatatcaactagggatgcacgagtaacaatgccctttaagttattctcatggtcaacaactggagcgtattttaaaccaagttttaaaatacgctcagcagtatttctaagtaagtcgtcttccataacataaaaatcagtatgttttaagatatcagaaacaagtcgatctttcttatatttactgcttagagattctaagtcaataaaaccaattaatttaccgttatcggttactagaagtgagtcaacgcgtttttggcgcattagtgtaatagcttcagttagtgttttttcagcagttattgaaacaggattatttaacattatctgtttaacaggagtaatatcagcctgcgcatgaaggagacgctcttctccaatcatttgttcaacgaaactagtagcaggatgatgtaagagatcattgggtgtcccttcttggaccattttaccattgtccataacaataatttttgttgctaacttgagggcttcatccatatcatgagtaactaagatgatagttttccccatttcttcctgaagagacttgactaagtcttgaataccttctctagtaataggatccagagctccaaaaggctcatccattaaaataatatcttggtctgctgcaagagcgcgaatgacaccgatacgttgttgctgaccgccagacaactcactagggtagcgatccaaatattcttcgggtaattcaactaatttaataagttcccttgctttagctcttttagcttcttctgaccatttcaataattttggtacaagaactatattttcgtaaatggtcatatgaggcattaaaccaatgttttggataacatatccaattctgcgtcttaattcaatggggttaatagtagaaatatcttttcccttaaataatagagtaccatttgttggttttaacatatggttaaccatacgcattaatgttgttttacctgatccactcgtaccgatgaaacaaacaaaatcaccagggtaaattttaaggttaatgtcttcaaccgcaacattttccccatacactttattgatattttgatattcgatgataggttcttggcccatattattctcctctacaaactatattatagtaataatatcaaaactttggcaacatgtctgaaatttgttttaaaatttaatgattttaaaaagaatcgttaagcttgagcctgatctacattttcagaaaatgtagaaaaagtatgaaaaaagagttgacaaagtaagagatgatgtagtaaactaaataagttgtctcgagagagcagtttctattagcgcgtagttaacaacttaaaaaaagtagttgacaaagcagaataagtttgctagaatatagaagttgtctcaagagaggcaaagacctttgaaaactgaacaagacgaacgaatgtgcagggtggatttacattgtaaatccgtcaatgacaaaaaaacaataaatctgtcagcgagacagaaaagagcaaagctcaaacttttaatgagagtttgatcctggctcaggacgaacgctggcggcgtgcctaatacatgcaagtagaacgctgaggtttggtgtttacactagactgatgagttgcgaacgggtgagtaacgcgtaggtaacctgcctcatagcgggggataactattggaaacgatagctaataccgcataagagtaattaacacatgttagttatttaaaaggagcaattgcttcactgtgagatggacctgcgttgtattagctagttggtgaggtaaaggctcaccaaggcgacgatacatagccgacctgagagggtgatcggccacactgggactgagacacggcccagactcctacgggaggcagcagtagggaatcttcggcaatggacggaagtctgaccgagcaacgccgcgtgagtgaagaaggttttcggatcgtaaagctctgttgttagagaagaacgttggtaggagtggaaaatctaccaagtgacggtaactaaccagaaagggacggctaactacgtgccagcagccgcggtaatacgtaggtcccgagcgttgtccggatttattgggcgtaaagcgagcgcaggcggttctttaagtctgaagttaaaggcagtggcttaaccattgtacgctttggaaactggaggacttgagtgcagaaggggagagtggaattccatgtgtagcggtgaaatgcgtagatatatggaggaacaccggtggcgaaagcggctctctggtctgtaactgacgctgaggctcgaaagcgtggggagcaaacaggattagataccctggtagtccacgccgtaaacgatgagtgctaggtgttaggccctttccggggcttagtgccgcagctaacgcattaagcactccgcctggggagtacgaccgcaaggttgaaactcaaaggaattgacgggggcccgcacaagcggtggagcatgtggtttaattcgaagcaacgcgaagaaccttaccaggtcttgacatccttctgaccggcctagagataggctttctcttcggagcagaagtgacaggtggtgcatggttgtcgtcagctcgtgtcgtgagatgttgggttaagtcccgcaacgagcgcaacccctattgttagttgccatcattaagttgggcactctagcgagactgccggtaataaaccggaggaaggtggggatgacgtcaaatcatcatgccccttatgacctgggctacacacgtgctacaatggttggtacaacgagtcgcaagccggtgacggcaagctaatctcttaaagccaatctcagttcggattgtaggctgcaactcgcctacatgaagtcggaatcgctagtaatcgcggatcagcacgccgcggtgaatacgttcccgggccttgtacacaccgcccgtcacaccacgagagtttgtaacacccgaagtcggtgaggtaaccttttaggagccagccgcctaaggtgggatagatgattggggtgaagtcgtaacaaggtagccgtatcggaaggtgcggctggatcacctcctttctaaggataaggaaacctgccatttgcgtcttgtttagttttgagaggtcttgtggggccttagctcagctgggagagcgcctgctttgcacgcaggaggtcagcggttcgatcccgctaggctccattgaatcgaaaggttcaaattgttcattgaaaattgaatatctatatcaaattccacgatctagaaatagattgtagaaagtaacaagaaaataaaccgaaaacgctgtgaatatttaatgagttttctagttttaaagaaactaggttaataaggttaagttaataagggcgcacggtggatgccttggcactagaagccgaagaaggacgtgactaacgacgaaatgctttggggagctgtaagtaagcgctgatccagagatgtccgaatgggggaacccactagttaatgactagtatccatatctgttaaggatatgagaaggaagacgcagtgaactgaaacatctaagtagctgcaggaagagaaagcaaaagcgattgccttagtagcggcgagcgaaacggcaggagggcaaaccgaagtgtttacacttcggggttgtaggactgcgatataggattaatcattatagaagaattacctgggaaggtaagccaaagagagtaacagcctcgtatttaaaatgatagattaaccttagcagtatcctgagtacggcgagacacgcgaaatctcgtcggaatctgggaggaccatctcccaaccctaaatactctctagtgaccgatagtgaaccagtaccgtgagggaaaggtgaaaagcaccccgggaggggagtgaaatagaacctgaaaccgtgtgcctacaacaagttcgagcccgttaatgggtgagagcgtgccttttgtagaatgaaccggcgagttacgatatgatgcgaggttaagttgaagagacggagccgtagggaaaccgagtcttaatagggcgtcatagtatcatgttgtagacccgaaaccatgtgacctacccatgagcaggttgaaggtgaggtaaaactcactggaggaccgaaccagggcacgttgaaaagtgcttggatgacttgtgggtagcggagaaattccaaacgaacttggagatagctggttctctccgaaatagctttagggctagcgtcgatgttaagtctcttggaggtagagcactgtttgggtgaggggtccatcccggattaccaatctcagataaactccgaatgccaacgagatataatcggcagtcagactgcgagtgctaagatccgtagtcgaaagggaaacagcccagaccaccagctaaggtcccaaaatatatgttaagtggaaaaggatgtggggttgcacagacaactaggatgttagcttagaagcagctattcattcaaagagtgcgtaatagctcactagtcgagtgaccctgcgccgaaaatgtaccggggctaaaacatattaccgaagctgtggatgacacaaaagtgtcatggtaggagagcgttctatgtgtgaagaaggtgtaccgtgaggagcgctggaacgcatagaagtgagaatgccggtatgagtagcgcaagacaggtgagaatcctgtccaccgtaagactaaggtttccaggggaaggctcgtccgccctgggttagtcgggacctaaggagagaccgaaaggtgtatccgatggacaacaggttgatattcctgtactagagtatatagtgatggagggacgcagtaggctaactaaaccagacgattggaagtgtctggtcaaacagtgaggtgtgatatgagtcaaatgcttatatctttaacattgagctgtgacgaggagcgaagtttagtagcgaagttagtgatgtcacactgccaagaaaagcttctagcgatacatatactctacccgtaccgcaaaccgacacaggtagtcgaggcgagtagcctcaggtgagcgagagaactctcgttaaggaactcggcaaaatggccccgtaacttcgggagaaggggcgctgattttagatcagccgcagtgaataggcccaagcaactgtttatcaaaaacacagctctctgctaaatcgtaagatgatgtatagggggtgacgcctgcccggtgctggaaggttaagaggagtgcttagcgtaagcgaaggtatgaattgaagccccagtaaacggcggccgtaactataacggtcctaaggtagcgaaattccttgtcgggtaagttccgacccgcacgaaaggcgtaatgatttgggcactgtctcaacgagagactcggtgaaattttagtacctgtgaagatgcaggttacccgcgacaggacggaaagaccccatggagctttactgcagtttgatattgagtatctgtaccacatgtacaggataggtaggagcctatgataacgggacgccagtttcgtttgaggcgttgttgggatactacccttgtgttatggctactctaacccagataggcaatccctatcggagacagtgtctgacgggcagtttgactggggcggtcgcctcctaaaaggtaacggaggcgcccaaaggttccctcagactggttggaaatcagtcgtagagtgtaaaggtataagggagcttgactgcgagagctacaactcgagcagggacgaaagtcgggcttagtgatccggtggttccgtatggaagggccatcgctcaacggataaaagctaccctggggataacaggcttatctcccccaagagttcacatcgacggggaggtttggcacctcgatgtcggctcgtcgcatcctggggctgtagtcggtcccaagggttgggctgttcgcccattaaagcggcacgcgagctgggttcagaacgtcgtgagacagttcggtccctatccgtcgcgggcgtaggaaatttgagaggatctgctcctagtacgagaggaccagagtggacttaccgctggtgtaccagttgtcttgccaaaggcatcgctgggtagctatgtagggaagggataagcgctgaaagcatctaagtgcgaagcccacctcaagatgagatttcccatgattttatatcagtaagagccctgagagatgatcaggtagataggttaggagtgtaattgtggtgacacatttagcggactaatactaatagctcgaggacttatccaaaaagagatattgacaacgttacggtttcttgttagactatagatattcaattttgagtgaataaggctcaatagttaagtgataattgcctaggagatacacctgttctcatgccgaacacagaagttaagccctagaacgccggaagtagttgggggttgccccctgtgagataaggtagtcgcttagcaaagggagtttagctcagctgggagagcatctgccttacaagcagagggtcagcggttcgatcccgttaactcccatagaagcgggtgtagtttagtggtaaaactacagccttccaagctgttgtcgcgagttcgattctcgtcacccgctttactttataagaaagtaaaaaccaagcaatagcttgggcgcgtagctcaggtggttagagcgcacgcctgataagcgtgaggtcggtggttcgagtccactcgtgcccatcaagaatatggtccgttggtcaaggggttaagacaccgccttttcacggcggtaacacgggttcgaatcccgtacggactattttttgttatatggaggattacccaagtccggctgaagggaacggtcttgaaaaccgtcaggcgtgtaaaagcgtgcgtgggttcgaatcccacatcctcctttaaagatatcgcgggatggagcagctaggtagctcgtcgggctcataacccgaaggtcgtaggttcaaatcctgctcccgcaataggctcggtagctcagttggtagagcaatggattgaagctccatgtgtcggcggttcgattccgtctcgcgccatttataccttaggagagatagcgaagaggctaaacgcggcggactgtaaatccgctccttcgggttcgggggttcgaatccctctctctccatagtaaacgggcatagtttaaaggtagaactaaggtctccaaaaccttcagtgtgggttcgattcctactgcccgtgttttttctaatatggcgggtgtggtgaagtggttaacacatcagattgtggctctgacattcgtgggttcgattcccatcactcgccttttcatggggtatagccaagcggtaaggcaagggactttgactccctcatgcgttggttcgaatccagctaccccagttttaagatagccggcgtggcggaattggcagacgcgctggactcaaaatccagtgtcctcacggacgtgccggttcgaccccggccgccggtatacttataaagacaaggtttctaaaccttgtcttttttctactagataatttattgtgaaatgttacttgtaatatatatttatttttttcattgtagaagaatttatataataataaatattaattattaatttaattagggcatttaaaatatacaaatgattttctgtttacatgttaagactaaaactataaaaatacgtgaaaattttgttatactaaaattaattttataatgttggtgaataatagttaatttcattatatacttgatatataaaatttatattctaagaaaagagaacatgatgagaaaatatataaaatggttaattcccatatcaatttttgggatgatacttggaggctgtcaaatgaatagtgaacataaaattcagtcaaacgaagtaaaaaatagcaagcaatcagaagtgaagaaagataaaaaaatgacaaaaaaagaacaattagcctatctcaaagagcatgagcaagaaatcatagattatgtaaaattacataacaaccaaattgagtccgttcaattcgattggtcaagtgtaaaagtagaacaaagcgggaatggaactccacaagggggtgattataatctttcactgagaggaaagtttaatcatctacaaaattcaaaattaatagttgatttttatttagctcataaaaatgatatcccaaatatcaaatcaatgggaatgctaaataagccgtatatacataaaaatggtatttggcacatttatgaatagcttgaatcatcctatataaagtaatagaatttttaccacaagcaaggtagaggagaagaataattgagtaattggaacttagataattttgataacttacatagctctttagcagaaagtgcatataatagtcgacctaattcatttcctgaattatttgagactgactcagtaacagaagtaaaattttctcaaccctcagaagataacaaaggtcaaatcacacagggtggcactaacctccccaatgatggtattgtctacctgcaaccagataagtccttaaaatctattgatgaaaatgtaaaggtcctcattccagatgtcaatggaggctatcacactgagcattatgttactcattcttatcaaaaaggtgtgcttactgacgataaggcaggttttaatgcttactacctgtcagatactgaaaaaatagatagcactacaaagcacacttatctagccattcgtggtagtgatgggattggtctagatacactaaacgattgggttagtaacaatgcaatgtttgctgtctctaacaagtatattccacaagcgaaattggctaataaggctatgaaagaaaaaattgccgagctaaaaggaaaagcgcctggagctattatagatgttactggtcactcactcggtacgattgtatcttctcaagcagttgttaatcttagctatgcagaattggagaatgttggtcaagtagtccttttcgatggccctgatgtatcaagaagcttggaaaaaatggaaggcatttctgctaaaaaaatccaagaagctgggaagcatgttacctactatgtcaatccctttgatatagttagtatgcttaatcgtgaaaagccatagaaagaccaattcgggaaagtaaatgtcattgttcctagtaaatatacgggtacttttgatgagcaatcttctcacgattttggtgccttccaaattgatagtagcggaaatcctttagttgcttctgaaagctatcatccagaattattaacatctggtcaagacttagctagactcgaaaaaaaattcataaagaatcttttaggagagcattatgattcggataagctaggaccagtactcaaaggcgctctgactggggacctgactcgactaattgcaacattaaaagcttgtggtatcagtgtcactgtaaacgaagctaaaaaactgtacgataacttccaaaaagactacaaagccataatttccaaagctaaaaaagatggcctcgagtgggatcgcaaaaacatcgcaagcttccatagtaggatcaaatcagcatcaggcagtcaacggattttacttagaactcaaatgctctatatggcaacgcaattagcagaatcagatgtttcagaaaaagtctctgcaacaaaaaaacatattagtgaagctaaggatacgattgtagaaatatcgacatccactatttcatcagctgaaataatggctatgcaccttgaccaatcagaagttgatgctctggtttcagatataaaaatgtcaacagtttggaatgatggcgtagagacttctgattatgaagcacttgatcactataaaacaaaaatgaccacatttacgaccaatttggtaacagttgcacaaaatttaacagctcaagatgagcaactagctggtgatattgtcacgaacttatcctaaaatagagagattaaatgaatgtccaaagaattgaaattgcccttgaatgaaatgttgaaagaacaagaaagaatagctattaaggcaatagttgctacagcaaaaagcactattacggatactggaacaaatttaaaagcaactttagagtcagatgcccaagacctaaaaaactatgcatccacctataacgccaatatcacggatggtcttgaaggccagtcagctcaagcagcatctgatttcttgacacaacttccaaaaccagagttagataatccagtcaattaggaggctagtatgatagatacaaaaaaactgcaagaactcgatcaagaatatgatcaaaatctcagaaacatttatcgtaacagagagcaactagaagatgactttcacttgtttatggcaagaacagacagcctaaaagagtctgtctatcaagcaactttaggacaaggttgggaattaccccaagaagctcatgcacacctatataatatggatgataataaggatacattcatatcagaattcaatgaatatatggaaaagcttgaagaaaaggaaatagatcttcgaagagtttataatgatagagtagatgaattgtatcagaaggctaagcaaaacgaagcaaaaaaaggataaaaattttttcaagtaatatatataaatatgaaaaataaagaatcttgcagtaaaatgagtatttatttttcacgacgaacagtcactacaaaatcactaaaatctcaaaattacttggtttttaagttaatgtctaatactcaaaccttgttaaatcaatgtttgttatctttaaaaagtgctcagtagcactcaaaatccattgtcctcacggacatgccggttcgaccccggccgccggtatacttataaagacaaggtttagaaaccttgtctttttctatttttttttaaaatcaataaccataagggtaccatttatagttttatactttttcaattagatattttgctatattatcatgatcccgaaaaagattcttacggttaattcctatattgtctaattctttcataattttcattttgttttgtactttaatagttttatagagataatgagtaaatatttatttaaatactgggagtttatttcacgataaataaaatttttactcaatagatgaacagaaaaagattgtatactattgaaaaatttaattcaactggagattgtttggtgagtttatataaaagattattattgtttcaaattattggattctttgtgaagttattaatggaattactttaaataaaggaggaaaaattattttaaaaagtttgacttgttgcattacttattattccaagaagaagatctattccatgagttagtagatataaagacataagcttgaaaattttcaagcttttttatcttgctatttataacattaagtgatatatttataacataatacatgtgatatatttataacataaacttgggagattttatgaacaataaaaacaaatggactataattttacttatttttactatcatcgtaattgatgttagcttactatttggcgggaatcgtttaagtttaccaatcaaattattaattttattagtaaccagtatagcagaattttgttcgatttttataatgataaaagttccgactcctcaaaaatataagaaagaaccatttggattaaaagcaaaattttattctattgtactctttctctcgactattctttatacaattgggatatggaatgtgacgccagcttccccatacaatgttaaagaatcaattcttggagttggcattttaatacaagtagttttcttcatttattttctattaaaaaaaattaacgaaagtcccgatgaacgcttttatagtaatttagcattgtcagcttctttgatgtttttgatatcaataatgttattaattcttatagctatttaccttaatatatatggaacgttagagttaaaatcaggctacctttatattatggtaggtttattattactaatgtttgctgttacatattactttcttgagggacggagataataatggggaaagaaacaaaaattatcagttctttaaaacaggttagagaagatatcggaatgactcaacaagagttagctattcggataggtgttaggagagaaacaattggtcatttagaaaataacaggtataatccttctctagagatggcacttaaaattgttaagattttcgacatgaagatagaagatatttttcaattaaggaaagaggattaaggtgaaggaagtaatttgttcgttttgtggggaaaagattttataacttataaataaaataaggggtacgcaggattgcttcctcttaataggatattagctactggcctagaagtacatcatgatatttgtagaaattgtggtactattgctagaagttatataaatgacttggagaaattgaaataggtatataaaatatattggttactcaaaaatcactaaaatctcaaaatttcttagtttttaacctgatttccaaaacacaaatcttgttaaatcagtgtttgtttactttaaaaagtgcttggtagcactcaaaatccagtgtcctcacggacgttccggttcgaccccggccgcctgtatactttaaaagataaggtttctagacctcgtcttttttgttttgttagataatttattgtgaaaagttacctaaaattacttatatttgttttttattattgtattttttataatgtagttaataacttttcaaggaggtaatattatggaaattttaattgaaacacacttatttatttactctggaagaaaggaaataaaaattgaataaattttttttagaatcagagagacttattataaggccactagaagaaagtgattatgatagttggtatactagttttatgaatcgtggaccatctttaactccatttgatgatgggatacttgatatgtctatgtgtgacattaattggtttaaaaatttagtaaatttacaaaggaaagaatgggaaagtgacatagtatatatatttggtgtttttctaaaaagcggtgagcacgtaggaatgttaaatattgttacccttgcaagagcagatatgcaatggggagaattgggatatgtttttcataatcaattttggagtaatggctatgcatttgagtcaatcttggcattacttaatagtacttatgaaaaattgggttttcatcatattgaagcacagattactcctgggaatgaacgatcggaaaagttggttagaagattgggattaacctatgagacaactcgaaaagatttttcatttgagaatggaaaatggacagataaactgatttatagtataaatttacataataataatttagaataattttatagacttacaaagaaatttaaagcttataatattgtatttttggagattattgaagtggtttatagataattaaggaaggaatattgattagaaatgaataatttggatacactatattgtaaattagcaatgtgcaacacagtactaacggaaagattacgactccagcctgttgaattaactaatgtaaatgattttttagaattttcatctgattctgaaacagtattctatatgcaacgttataaagctaataccgtagaagaagcacaagtcgttttagcaaatgtttgtatgaaatcaccattaggaatttatgcaatgattgaaaaagaatcacagaagatgataggtattattgaattagaaatcagagatgaattttctgcagaatttggttatattttaaataaaaattataatggaaaaggttatatgacagaagcttgttcaaaattgatgtcaattggatttgaacatctagacttggaaagaatttatgctagatttgacattaataataaaaaatctggaaatgttatggaacggataggtatgaaaaaagaaggcgagcttcgtcatcttgcaaaaaatccaaaaggtgagtggaaaacaagagcgtattattctattttaaaagaagaatattttaataaagttaatactaaatagtctgagatgtagagaattagatataatctttttaatcagccagtgggtgatgtcgttgaaaattttacggaaggtaaaaatccgaagattgatacacttaatgggaaaacagttagaatagaaaaaataaatccagatcattttgaagacttatttcaagtttatggagaattgtctactgaagatagtttaacttatatatcttttagcaaatttaatagtaagaatgaatttgatgtctttttccaaactctattaaaatcagaagatccttattatttagctattgttgataataatactggtaaagtattagggactttttcattaatgcgtattgatacaaaaaatagagttgttgaaatgggatgggtggtttattcatcaaaactaaaacaaacaaggatagcaacagaagctcaatatttggttatgaaatatgtttttgaagaactctgttaccgccgttatgagtggaaatgtgatagtttgaatgcaccatctaataattctgcaaaacgacttggttttacttttgaaggaacttttagacaagctgtcgtatataagggtcgtaacagagatacaaattggtattctattttagataaagagtggccagagaaaaaaacacggtttgaaaaatggctagatgattcaaactttgctgtaaatgggtatcaaatcagatcactatcaagcattgagcagaagacaaaatagagtcattcattaatcactaaaatttcaaaattacatgtttttttagctaacatcttaaactttgttaaataaatgtttattaacttttaaaggtgcatggtaggactcaaaatcgggtgtcctcacggacgtgccagctcgactttggtcgcgggcatcaaagaaaaaagtcaagattattatcttgtctttttttctatgagttattaactgtaaaagttacataaaattaccaaataaattttttaacaattaattatcattctttatctaatttataatagggcttatattctatgtttgcccctatacttgaagcatgtacccattctttttctttaagttgtttaaagttttcggctttacctgttaatattattcccgaaaattttaatttgtcgctattatttaccttgtcgtattttttggcatacttttctaaatctgagtagatatttatattattaaagtatacttttgagttaccttttaagttttcttttattttatctatgaatatttgtggtgtattcaaagtttcaggatctgtaccgaattgatactttgttggccaatatgatgtatctaattctgtgcttgtacctatccataaccaattttgttttatattatttggtatcattgtttttatttctttgtaactataggacttatcaaaagttattgcaatttcaataagatcattattcaatttatttacatattttaaatcatttgttggagttgttttggcttctccttttttatacttaacatttttattgaaaaattgtggaactttttgtctagtacctcgatcatacaagccattcttttctgatttttcatcagcatttgtgccaaaagtacctgagatactataattttcttcaaaactagaatatggaatttgaaccccatcgatatctttaaatctatcagcatgtactttaccagtaaactgaccgcttggctggtaatagagactatcataggaaatatttggatatgctatttcagaaagtagttcaaagttatgatatgttttttgaccattttttgaagttaaatatgtaaaccctttaaaagctattccaactactaatagtacagttattaatgccaatactacggtcttgaataatgttttccttttcctttttttggctaattgttccagtggatcactaaactttgtttttatcatattttaaaattatccttttctaaatattttttaacttctcttctagctcgcataagtcttattttaattgtactttgtgattgtccagtaatttcagatatttctttaattgaaaaatcattaaaataatataaatctattaaagtttgataatctttcttcaagtgtaatattgcttcatgtaattcaaaaaacttctctgattcggtgtaatacaaattattttctataaagaattctttttgcaggatttcgttatagcgtttatttcttcgataaagatcaatatacctcctaattgtagtacgatacatccaagcttttattttatcaagtggaagggagaaatcagattctagtatttgtaaaaagacgtcttgagtaacatcctgtgcttgactaggattaacacctgacttaataaggtaagctattatttgatgtgaaataactagtaattctttttcatagtcatctaaaattgacattttacctcctttcgctattatattaaaccctcttcattaatataacgaattaaagagagctttggttacataaaaaaataatttatatatattaaaaatcaggtgatggtaaaaattaaagataaaataataaacttgtttttagttcatatgttagttctaaataataatataaaatcgtaaaaattttgttagactaacattggttttaaaatcttgtaaaaaataattatttttattaggtacttgacataagaagtagtttttaagaaaagagagcatgatgaaaaaatatataaaatggttaattcccatatctattattgggatgttactagtaggctgtcaaatgaataggggacctaaaagtcagtcaaacgaagtaaaaaatagcaagcaatcagaagtgaagaaaggtaaaaatatgataaaaaagaacagttagcctacctaaagaacatgaacaagaaataatggtgaattatttaaatgtatcttttgatagagtagagtatacgatggtatttttaatgagatgtagagtagattgaatgctttctttaaatttagaagtattatctagctcagtaattttaatatttgtttttctatttgttttagttcttcctctagattttcaggctttatattaaggatatataattgaataaagaaagtaatgaactgtccgattactgctcgaagtatttccattttattcaacgaatttccttcacttaaacagttgaaaattttagtaatgtttggatcagttgaatttattagcttagtaaaaatagttgatgtttcactattgattaataattcttgcatcaatattttaatgagatcattatttttttcaataaatttaaaacggtcctgtacaaagaaatgaattagttcctctttagtagaaaatgtagataattctgtaaagaaggggcgtccaatagtttgtacgattaactcgagaataaagaccaaaagcttgtctttagtttcaaaatatttatatatagttgcttggctaacttctgcatttttagctagttgagcagtggaagttccatggaagccttgtgaggcaaagagctctatagcggataaaataactttttgttttccttttggcatctcttggtcattaatatactgttcaatagaaaaaataatattatttttcatacttagttccttttcaaatggtattatactttacggtatcgttttagtccaaagatatttgcgatggttaaaataattaaaaatagaagaagtaccagaagatttgaagaaacgttaggtaatccttgaccgtacataattatttttgtaagtgcatcaccagagtaggagagcggtagaattttaccgactgtctgagcccaacttgccatattttctagagggattattcctgaaaagaataattgaggcattataattaagggaataaattgcatcatttgaaattctgattttgctagagtagacattaagattcctaatgataaggcaaccagagccaaaataaaattgacaatgatgacactaaaaatactacctacaacttgaatatctagtagccaaatagttgataaaacgataactatcgtttgaataattgctagaatgccgtatgataacatatatccaaatacaatatcactacgtttaacaggagttgcaaggagtcgatcaagtgtaccagaagtacgctcttttaataaagccattccagaaattaaaaaaacaaagaagaagaccataaatcccattagtattggtatcatttttgcaaaaaagcctgtatttttatttccgtaattatatttttctttgatatatttggagcgagtttgtaaggattgtgctagtttcggattcttattagctaaaattttaacttgcgaaatcagttccttactgttcattgtattaacagcggttttaaaagcttgtcttgttaaagtcgtctttgaagaatctgtattcgcatagaagacagtataagatttattgtcctccgaaataagagcatcaattttatttgatttgagtgcttttttagcagatgagttaaatttaaatgatctcacttgaatatgcttaatattatctaaatttgaaacgaccttcgtgttaacgttaatagttccaatcttaacttttgtattactattcgcagaaaacataacattcatcaaaaacataattaaaataggtgctaaaaacatcatagcaagtgttcttttatcacgaaacagttcttttataaccttttcagttattgcaataattctcatgattattctccttcagcttttaagaaaacttcctcaatagtactcacattaaattgtttttttaaatgtaatggagtatcaaaggcaataatgtttccacgtaatagtagtgcaaccttacttgttaattctgcttcatccataacgtgggttgtaataaagatagaatgtccttcatccttaatattaattagctcttgccagatttttctcctcaaggatggatcaattccaacggtaggttcatctaggattaaaactgtggggtttccaagtagggcgatggctagagaaagccgtcttttcatacctcctgagtaacctgagacaaatttatcaagttggttttctagatctactactttagaaatatgagttatctgctgttttaattcagttttttgaatacctttcatttttccaaagaataataaattttctaagccagttaaagactcgtataaggcatcagattgagccatatagccaatttgatttaaaatattacgatctggcatttgagtatcaagaacaagagctgttcccttatctgctttttccatgccaagcatagttttaatcaaggtagatttccctgctccagagggtcctattaatccaattatttcgcctttaaacacctccaaattaatattatttaaaacggtttctgaggcatatgctttttgtagtttttttaaatcgatgacttttttcatgataactttttgctcctctctcagtgagtgagtgtttactcacttatttgatatcatatattatagtgtgtaaagacaggcttgtcaataaaagaattgacaggaagttaatataccataatagtcaataaaatggcttatttgagataactaattttttatcttaaaaatcagttgcatggagagcattcgtgaaaatgggcacagaataaaacgactaagaatatccttgtcgttttattttttatatagttatacctcttttaaaattcaatataatagacttcctgcgaaactaaaatcctagttcacggttgatcattccagcaatcaaattcattcgtaatccaaaccgtttgcgtcgatttcgataggttgttgaaaatattttaaacgtttttactttggcaaaaatattctcaaccttgattctctctttggatagcgtatggttataggttttatcttcaagagttagtggcttaagtttgcttgatttcctcggagtttgcgcttgtgaatacatcttcatgatcccttgataaccactgtctgccaagattttagcagcttgtccgatgtttctgcgactcattttgaacaacttcatatcgtggcaatagttcactgcaatatccaaagaaacaattctcccttggcttgtgacaatcgcctgagccttcatagcatgacatttctttttaccagaataattcgctagttgatttttttaggacgattgatttttacctctgttgcatccacaatcaccgtatcctcagcactaagatgagtttttgaaatcgtaaaaccactttgaataagagttgattcaacccattgacttcgacggattaagttgctttcgtgaatgccaaaatcagccgcaatttgttcataagtgcggtattctcgcatgtattgaagagtagccatgaggagatcttctaagcttaacttaggggttcggccaccttttgcgtgtttacgttgataagctgtttttaacacagctaacatctcttcaaaagtagtgcgctgaacaccaacaaggcgcttaaatcgtacatcagttaattgtttgcttgcttcataattcatagaactattgtaccatattttgtttcgcaggaagtctaataatgtttattcaggtattttttaacaatgatatgaagagagaagctaagtcccagtataattaaataaatccaaagggggatattaatgaaaggaagatgataatattttcctataaggatataagctatgataagcgaaagaattagaaatatatatcgaaagaaatatttcttttctttcgatttatcgaagttatatgtagcatatattatggtatcagctatcttgacagcaataatactgataaagattgcaaaaagaacatctaatagagtaatagggattagatctggtactgactgttgaagtgcttcagtaatgagatatcctcctaaaaagataatcatttggatagttagtagtaaaatggctaaatcccaacgttgtaatgtttcttctttcttagagattttaggtgtagatttaataacttggtttataaagtcatgcctatcttctccaaatacactaactaaacttgcttgtcgctcttgtgcttctaataacatattgacaatatcatttcgaatgagctcctgatggtaggggctaatgctagcacctcgcaaatagacaatcatatctgtataggtttggttattagagttatcaattcttccttctaatagcgtattttctttttgtaattttttcagtttatccatgctagtttcctctccaatttttagagtagtttgtttaatgctttactaagtgactcccaattctgtttaaattgggctaattgctccacgccttcattggttaacgtataatatttacgcttaggtccttgaggggaaggcttttgttgtccttttatatatttattgctttgtagtcttaagataatggggtagattgtcccttcggaaatttctccaaaaccataagaatttaatttttttgagatttcataagcataagtctcctcttgctgtatgatttttaggatagctccttcaagtaatccttttagcatttgcgatggaatcatattatatccttgtctatattgtaatacaagttactggtatagctacattgtaatacaaagtagttgagatgtcaaatataactaagttaccggtagaaaataagagtgatagacgatgattcttctaaaataggtttgtttatgtcctttagtttatgttataataatgtgaagaaactttaggagtgagtatgaaaatagataaaaaagaacttttagcacttattgctagtattattttattaatttttgcttctgttacgtttttcttatttaaagatcatggcactactcaaatggatactgtagaaagcagtgttaaccatgtcagtgattctcaattaactgaggcacaagatatgttagataaatttgagaagaaaccttcagaaaaattattgaaggatgtcgaacttgctttaaataaattgtccaattcttctaaaaaagaagctttgcaaaaacgttttaagaaagcaaaagataagtatcttaaagacgaagcagataagaaagctaccaaagatgctacagatttagtagaaattctagaacaagccccttcagaagaaaatgtgttaaaagctgaagcagcagtcaataagttaactgtcaaagaatctaaagaagctttacaaaaacgtattgatactgttaagacacaatatggtttgattgggaatcaaactccctctagttcagtagctgaaactacagaacaagggacagctaatcctgctagtcaggatacttctagttacgttaatcagaatgtagcaccaacttatgagcaaccgcaagcgaataatacaccagttactccaggggttaacaatactgttccgactccaggaactggtactgtacctgctactaatgggacaggtgttgctcagtaaaatcctgaaagtctagttttactagacttttttgctatgctttttaattagccattctcatcaaaaactataagagaattagcaattgatagttttgaagaaggaaaagaattatgagcaacagcaattaaaaccttaaaaatacaaccaagtgaagtggtttataacaagtgtacagttctttcttagaataaaccatgacttgtcaaaaaataggtatataccatttacaaaaataccttaaagcgttataatgagagtgaatggggggaagaagatgacgaagtacatcaaggctgaccgattcttttatgctgatcatgtaaaggaaaacggttatttagaaataaaagataatcactttggtaaatggatagaaaatatttctggacaagaggagattttagattattcaggttatcaaatagcacctggtttagttgatacacatattcatggttttgctggcgctgatgttatggattgtgattcagaaggaattttgcgaatgagtgctggcttactatctactggagtcacatctttcttgccgacaaccctaacttcagatacaaagcgactagaagaggcgtctaaatcagttgcggcagtagcgggcaaagaacaaggagcaaaaattcaaggcatctattttgagggaccatattttactgaggaatataaaggagctcaaaatccgatttatatgagaaatccaaacttggaagagtttgctcaatggcagaaggctgcaaaaggcttgattacaaaaattgctttggcaccagaacgtgagggagttgaggaatttgtctcagcaatcacaaagcaaggtgttacggtagctttaggtcattctaatgggacatataaagaagctaaaaaggcagtgaaggcgggtgcctcagtttgggtacatgcgtataatggtatgcgtggtttgacacaccgagaaccaggtatggttggtgcggtttataatttacctaatacctatgccgaactcatttgcgatggtcatcacgttgatcctgttgcttgtgacattttaatgacacaaaaaggccataatcatgtggcattaataacagattgtatggcagctggaggtgcccctgatggagattatatgttaggggaattgcccgtggttgtgtctaatggaactgcgcgtttgaaagatggaggtaatttagctggttctattcttaagctcaaagatggattaaaaaatgttgtagaatggggaattgctactccggaagaggcagtgcgtatggcgagttatgttccggcagtgtctgtaggcattgataatgtctgtggacagataaaagaaggttatgcagcggattttattgtattagataaacatctagatttagttgcaacataccttgatggggaaaaacgttggcaatcttgaaagaactagtttttactagttctttttaatttattaatttttaatgaaatatagtttgacaataaaactattttttcttataatgttgtaatataatacaaaacaataggagtttacaatgtcaattattattgggttaatggccgctatgtttattattcgtttagcttatttaaagctatctatagctaatgaaaaggccttaagaaaaaatggtgctaaagaatatggtgtaggtgtttcaaaagcaatcacagttcttcatattatcatttatttttcatctgtaactgaggctattctaacaaaagcaagttttaattttgttagcgtaatcgggcttagcttgatgattttttctgtgtttatgttacatacagtaacacgtttacttggtcgtatttggacagtgaaattaatggtagataaaaatcatcaatttgtagatcactggttatttagggttgttaagcatcctaactatttcttaaatattgctcctgaacttttaggtgtaactttattgtgtcatgctaaatacacagcattatttgtcttgccaatttatgcttttgttatttatttaagaattcgtgaagaaaacttattattaaaaacgatcattattccaaatggaatcaaaaagtctagggtatattaagaataagataaatagtagacataaaagtcattttttgttatactgtctcagtaagaagaggtgttcatcagctgtttttttagcgagctcaaggtagtgaaagttgggtagaataggatgaatattggcactttttagtgagtaaaagtacaatcaaaaatgaagtaataaattagggtggaaccgcgtctttgacgcccctgtgctgttgggcataggtggtgtaggacgtggtttttatcatttgtccgttttaagtcaattgttgtcaccttcccaacagctgtaataaagtgtgaaagaaggaaaatgatgtctaagaaattaacttttcaagaaattattctaactttacaacagttttggaatgaccaaggctgtatgttaatgcaagcttatgataatgagaaaggagcagggacaatgagcccttatactttcttacgtgctataggccctgagccttggaatgctgcatacgttgaaccatcacgtcgtccagctgacggccgctatggcgaaaatccaaaccgtctttaccaacatcatcaatttcaagtggtaatgaagccttcgccgtcaaatattcaagaactttatttgaagtctttggaattactaggtatcaatccacttgagcatgatatccgttttgttgaagataactgggaaaatccatctacaggttcagctggattaggttgggaagtttggcttgatggaatggaaataacacaatttacttatttccaacaagtaggtggacttcaaacaggtcctgtaacttctgaagttacttatggactagagcgtttagcctcttatattcaagaggtagattctgtttatgatattgagtgggcaccaggtgttaaatatggtgaaatctttactcagccagagtatgagcattcaaaatattcatttgagatatcagaccaagtaatgttacttgaaaactttgagaaatttgaaagagaagcaaaacgtgctttagaagaaggacttgttcatccagcttatgactacgtccttaaatgttcacacacctttaatttattagatgcacgtggagcagtatctgttactgagcgtgcaggctatattgcacgtatccggaatttagcacgtgttgttgctaaaacctttgttgccgaacgtaaaaaacttggtttcccacttttggatgaggaaactcgtatcaaattacttgctgaggaagactaatgaacacactcattgttaatagtcatcctgatttttcgaatccgtactcatttacaactattctacaagaaaagtttattgaactttataatgagcattttcctaaccatcagttatctattttaaatttatatgattgtgttttgccagaaattacgaaagaagtactactttcgatttggtctaaacaaagaaagggtttggaattaacagccgatgagattgttcaagctaaaatctctaaagatttacttgaacagtttaagtcacatcaccgtattgtctttgtttctccaatgcacaattacaatgtgactgctagagcaaaaacttatattgataatatttttattgcaggtgagactttcaagtacactgaaaatggttcagtcggattaatgacagatgactatcgtctgcttatgttagaatctgcgggttctatttattctaaaggacagtatagtccatatgaatttcctgttcattatttaaaagctatctttaaagattttatggcttttgatgatttctgtgttgttcgtgcagaaggtaccgatattttagataggcaagttgttcttgataagatgaatcaggatttaagagaagcatttgaagcgttttacagtaaggagtaggaaatgactaaagatttattattggagcttggccttgaagagttgccagcttatgttgtgacaccgagtgagaagcaattgggccaaaaaatggtcaagtttttagaggatcatcgtttatcatttgaaactgttcaaattttttcaactccacgtcgtttggctgttcgtgtgaaaggattggcagaccagcagacagatttaacagaagatttcaagggtccttctaagaaaattgctttggatgcagaagggaatttttctaaagcagcccaaggttttgttcgcggaaaaggtttaagtgttgatgatatcgaatttcgtgaagttaagggagaagaatatgtttatgtcactaagcatgaaactggaaaaagtgcgattgatgttttagcgagtgtgacagaggtattaacagaattgactttcccagtgaacatgcattgggcaaataatagttttgaatatattcgtccagttcacactttagtggtattattagatgatcaagccttagagctagacttccttgatattcattcagggcgtattagtcgaggacaccgtttcttgggttctgacactgaaatttcatctgccagttcgtatgaagatgacttgcgacaacaatttgttattgctgatgcaaaagaacgccagcaaatgattgttaatcaaattcatgctatcgaagaaaagaaaaatatttcagttgaaattgacgaagatttactaaatgaagtgcttaatttagttgagtatccgacagcattcttgggttcttttgacgagaaataccttgatgtacctgaagaagttttagtcacttcaatgaaaaatcatcaacgctattttgttgttcgcgacagggatggaaaattgttaccaaactttatttctgtgcgtaatggaaatgctgagcatatcgaaaatgttataaaaggtaatgaaaaagttttagtggctcgtcttgaagatggtgaattcttctggcaagaagatcagaaacttaatattgcagatttagttgagaaattaaaacaagtaactttccatgaaaaaattggttcactttatgaacatatggatcgtgtaaaagttatttcacaatatttggctgagaaggcagatctttctgatgaagaaaaattagctgtgcttcgagctgcaagtatttataaatttgacctcttaactggaatggttgatgagtttgatgaattacaaggtattatgggtgagaaatatgccttacttgcaggggaacagcccgcagtagcagcagcgatacgtgaacattatatgccgacatctgcagatggagagcttccagaaaccagagttggtgcaattctagctttagctgataaatttgacaccttactttcattcttctcagttggtttgattccaagtggttcaaatgatccatatgctcttcgtcgagctactcaggggattgtccgtattttggaagcttttggttgggatatcccacttgatgaattagtaactaacctttatggtctatcgtttgctagtttagattatgctaatcaaaaagaggtcatggcctttatttcagctcgtattgaaaagatgattggctctaaggtccctaaagatattcgagaagccgttttagaatcagacacttatattgttagccttattctagaagctagtcaagcattggtgcaaaagagcaaggatgctcaatataaagtttccgttgaaagtttgtcacgtgcatttaatttagctgaaaaagttactcattctgtattggtggactcttcattgtttgaaaataatcaagagaaggcgctatatcaagctattttgtcacttgaactgactgaggatatgcatgacaacttagataagcttttcgcacttagtccaattattaatgatttctttgataatacaatggtaatgacagatgatgaaaaaatgaaacaaaatcgtctggctatactcaatagccttgttgcaaaggcaagaacagtcgctgcttttaacttattaaacacaaaataaggaggcattttatggatcctaaaaaaattgctcgtattaacgagctttcaaaaaagaaaaaaacagttggattgaccggagaagagaaggttgaacaagcaaagctccgtgaagagtatattgaaggtttccgccgatcagtccgtcaccacgttgaaggaattaaattagtggatgatgagggcaatgatgttaccccggaaaaacttcgtcaagtccagagagaaaaaggactacatggtcgtagtttggatgatccaaattcttaatggtgagacaattttagattaaagtcaacacttgggtggggcaaaagataatctttgtctcgccttttttattaggaaggaaaaaataatgattgaattactattagcattactgttatggaatattttagtatttgcaacctatgctattgataaaaggcgtgcaattagaggggcatggcgtattagtgagaaaacattgatgatagagagtttattattagggggatttggtgcattcctaggtggagaagtttttcgtcataaaacgactaaatggtatttcagactagtttggtatatcggaatgattattgatttagctattatttggctaatttggtgttattgatgatatcttatcaaaaattttaggagcatattaaatttttgatagtgcaggatagactgatttaggtataatagaattacaaaaagaaaacgcttacttttaaggaggaagtttatgtcttcagaagaaaaatacattatggcgattgaccagggaacaacaagctctcgagcaattatttttaataaaaaaggtgaaaaaattgcgagtagccaaaaagaatttccccaaatttttcctcaagcaggctgggtagagcataatgctaatcagatttggaattctgttcaatctgtcattgctggagcttttattgaatcaagcatcaaacctggacagatagaggctattgggattaccaatcaacgtgaaacaactgttgtttgggataaaaaaacaggtcttccaatttataatgctattgtatggcaatcgcgacaaacagccccgattgctgatcaattgaagcaagaaggtcatactaacatgattcatgaaaaaactggtcttgtcattgatgcttacttctcagcaacaaaagttcgttggattttagaccacgttcctggagcacaggaacgtgctgaaaaaggagagttgctttttggaacaattgatacttggttagtttggaagttaactgatggtctcgtccatgttacagactattcaaatgctgctcgtacgatgctttataatattaaagaacttaaatgggatgatgaaattttagagttactaaatattcctaaagcaatgttaccagaagtaaaatctaattctgaagtttatgggaaaactactccattccatttttacggtggagaggtgccaatttctggtatggctggtgaccaacaggcagcattatttggacagttggcctttgaacctggtatggtaaaaaacacttatggtacaggttccttcattatcatgaatacgggcgaagagatgcaactgtctcaaaataatctattaacaacgattggttacggcattaatggtaaggttcattatgcacttgaaggatcaatcttcattgcaggaagcgctattcaatggttacgtgatggtcttagaatgattgaaacgtcaagtgagtcagaaggccttgctcaatcatcaacaagtgacgatgaggtttatgtggttccagcttttacaggtttgggtgcaccgtattgggattcaaatgctagagggtcagtatttggattaactcgtgggacaagtaaagaagattttgttaaagctacacttcagtcaattgcttatcaagtacgagacgttattgacactatgcaagttgattcaggaattgatatccaacaacttcgtgtagatggtggagctgcaatgaataatttattaatgcaattccaagcggatattttagggattgatattgctcgtgcgaagaaccttgaaactactgccttgggtgcagctttcttagccggactttcagttggctattgggaaagtatggatgaactaaaagaactgaacgcaacaggacaacttttccaagcaacaatgaatgagtctcgaaaagaaaaactgtataaagggtggagaaaagctgtcaaagcgacacaagtatttgctcaagaggattaagggggtgtagagatggaattttcacgagaaacacgacgtttagccttacaaagaatgcaagatcgtactctggatttacttatcataggtgggggtatcacaggcgctggtgtcgctttacaagcagcagctagtggattagatactggacttattgaaatgcaagattttgcagaagggacaagtagtcgctcaacaaaattggtccatggtggtcttcgttacttgaagcaatttgatgtagaagttgtttctgatacagtatcagagcgtgcagtcgtgcagcaaattgcaccacacattcctaagccagatccaatgcttttaccggtttacgatgagccgggttctacttttagtatgtttcgccttaaagtggctatggatttatatgatttattagcaggtgtgacaaacacacccgcagccaataaagttttaagcgcagaagatgttcttaagcgtgagcctgatttacaaaaagaaggtttgctaggcggaggggtctatttagatttccgtaataacgatgcacgcctagtgattgaaaatattaaacgcgctaatagggatggagcttatattgccagtcatgtcaaagctgaggacttcttatttgatgacaacaatcaaattataggagtacgtgcgcgtgatttgttgactgaccaagttatcgatataaaagctaggcttgttattaatacaactggaccttggagtgacaccgttcgcaacttctccaatgaaggtaaacaaattcatcaattacgtccaactaagggagttcacttagttgtagatcgccaaaaattaaatatttctcaacctgtttatgttgatacaggcctgaatgatggtcgtatgatttttgttttgccacgtgaagataagacttattttggaactacagatactgattaccatggagacttagaacatcctacggtaactaaagaagatgttgactacctccttaatattgtaaacaaacgcttcccagaagcagagcttactattgatgatattgagagttcatgggcaggtttgcgtccactactatcagggaatagtgcctctgactataatggaggcaatagtggaaaactaagcgatgaaagttttgaagaattaattgattccgttaaagattatattgcacataaaaatcatcgtgaggatgttgaaaaagctatttctcatgtagaatctagtacttctgaaaaagaattggacccatcagctgtttctcgaggatcaagttttgagcgtgatgataatggcctattaacacttgctggtggtaaaattactgattatcgaaaaatggcagaaggtgccatggaaactattattaacattttggataaagaatataatcgcaagtttaaactaatcaattctaaaacctatcctgtttcaggaggagagattaacccatctaatgttgattctgaaattgaagcttatgctcaattgggcacactaagtggtttaagtattgaggatgcacgttatattgctaacctttatgggtcaaatgcaccaaaattatttgcattgacacgccaaattacagaagcagaaggtctgagcttggtagaaacgttgtcacttcactatgctatggattatgaaatggcgcttagcccaacggatttcttcttaagacgtacgaaccatatgcttttcatgagagataatttagattctttgattcagcctgttattgatgagatggctaaacattatcaatggtctgatcaagacaaaactttctatgaagaagaattacatgagactctaaaagacaatgacttggcagctttgaaggataattgaaggagataataatggatatttttggagaattcttaggaacagctctcttagtcttacttggtaatggtgttgtagcaggtgttgttttgcctaaaacgaagaatcataattctggatggattgttatcacatttggatggggacttgctgtagctattgcagcgttggtatctggcaatattagccctgcccacttgaatccagctgtgtcattagcttttgcgatcaaaggtgatttagcttggggaacagctattctttatatgattgcacagattattggtgcaatgctaggttcacttcttgtttatttgcaatttagaccccattatgaggctgcagaaaatagagcagacatccttggaacttttgcaactggtccggctttgaaggataatttttccaattttttaagtgaagtattgggaacacttgttcttgtacttactatttttgccatcggaaaatacaatatgcctccaggagttggtacgatgagtgttggtatgttagtggttgggattggtctatcgctcggtggaacaacaggttatgctattaatcctgcacgtgattttggtcctcgtttattgcatgccttgttaccgatgaagaacaaaggtgattctgattggacttattcatggattccgatagtaggacctatggtaggagctattttagcagccttaatatttgctatgatgtaagagatttttgatgctgagaccgactttatggtctcagttttttgttaccgttttcaaaaataacttcttttgttataataagtaattatgacagaaaaatatgtaaataaagtaattgtcattttaggagcttcttttgctggtatgacttgtgcgcagaaattacgccaattaaatcctaattgggatatcgttttgattgataaagaaattcatccagattatgttccaaatggcttaaattggtattatcgtcacgaaattagtggtttaaatcaggccatgtggcagacagaagaagagcaacggttgcagaatatacgctgtctatttggtctaaaagttgagaaaattaataaagaagatagggaattaatgttatcagatggttcttctgtctattatgatcaattgatttgtgccatgggctcccaagcagaatcaacttatattgatggggctgatgcgcaaggtgttttaacaacaaaaacttatgcaactagtcaaaatgctaagcaggtattagataaaagtcataaggtagcagttgttggggcaggtatcatcggtttagatattgcttatagtttacatgaatcagggaaggcggtcactttgttagaagctcaagaaagaccagacttcaggcatacagatcctgatatgtcccttcctttacttgatgcgatggctgaatcaaaactacattttttccaaaatcaaaaggttgagaaaattactgtaacccgagaagaaaaactttgtttgcgaacgctaacaggagacacctttacagttgatgctgtcatattagctgttaattttcgtccggatagtcgtcttttaactgggttggttgatttaagtgttgataatagtgttgttgtaaatgattatttccaaacgagtgaccctaatatctatgctattggcgatttgatttggtcgtattttaaaggtcttaatagtgcttattatatgcccttaattaaccaagcaatccgttcggcacaaatgttggcataccatttatcgggacatgctgttccaaaattaaaaataacacgcgctacaggatctaaacactttggctattatagagctaacattggattaactgaattggaagctggtttttacgaggataccgttagtgttacttatttccctaaagaacagtatgatttaaggataaaattgattgctaaccaaaaaacgggccatttattgggggctcaattaatctcaaaggaaaattgtttggctactgccaatcagcttgttcaagctatatcgtgtgatatgacagattttgatctggcttttcaagatttcatttatacagctagagaatctgagatggcttatatgttgcatcaagcagctatcaacctttatgaaaagaggattgggctatgcgaatagaagctctaatggaaaaagaaaggcgtgttcaatatcggctactttcttttttaagaggctctcctcaggcaatagcactgaagttagctttattagaaactggtttaagtcgagcaacttttcttaaatatatcaataatcttaatagctactttgaacaagaaaaagttaattgtcgaatcgtttattataaggataagttatttttagaagaggattataacttatccaatcaagaagtgttgaaagctctgatgaaagatagtattaaatacactatcttaatatctttatttaatcagcgtcagttcacaatcgttggtctttctcaagaattgatggttagtgaggctactttaaatcgtcatcttgctcatctcaatgaattgttagcggaatttgatattgctatttcacaaggaaaacagattggtgatgaattgcaatggcgttatttttattatgaattattcaagcaactatggtcttatgacaagtgccaaaatatgataaagaaattagacttagactcattaattctattaatagagcgcttggctcaacatactttaactcgagaagctcatcaaaatctgggactttggtttagtatttgtcatcatcgtctccttgctatggaaaaaatatctgataatctcaagcctattgtgaaacattatcaatgtaatgctttttataaacggttagacgcagccttagttttgtatatgagtcgttttgctcttgagtatagggaaggagaagttctggcaacttttgcttttctacattcacaaaatattttaccaatcaatacaatggaatacatcatgggatttggaggcccgattattgattgtgtaaccgaaacaatcatctactttaaaaaggagagtattttagctgacgagacatcagatcaggttatttaccaacttggtcagttatatagccattattatttctttaaaggtcatattttagttgaacaacctgatttagaacaaacgtatcgacttattgatcataatatgagggataagttgcatcatatttcaaagaagattattgcaaatgttaatcgaattagacctttaacagaagatggttgttctttgctgactttacatttgttggaattgcttattttctcgaaaaatagtcaaaaaatgccctttaggattggtctagatatgacaggtaatgctgtggaacagtcattgttggaatatcgcattcgacaacatttctctggtaataattctattcaagtcgaaccttatgacgaaggaaagggatttgatatggttatttatcagagtcactcaagaccttataaagccaaactaacctattgccttaataaaggtgcttcagagcgagaactacaggaaatagattcacttatttatgacaattaatcccattacttaattgaatggttttaatccctccagaaattgttaaaacgtttacgtattttatgttataatatcaaagacgaacaattttaaatttagttgttaaaaacagaaaggttttatcatgacatttgacaccattgatcaattagcggttaatacagtccgcacgctttctattgatgctatccaagcagcaaattctgggcacccaggtcttcctatgggagctgcgcctatggcttatgtgctttggaataaattcttaaatgtaaacccaaaaacaagtcgcaattggacaaaccgtgaccgttttgtgctatcagctgggcatggttcagctcttctttatagcctacttcatttagctggctatgatttatcaattgatgatttaaaacaatttcgccaatggggatcaaaaacacctggacatccagaagttaaccatactgatggtgtagaagcaacaactggacctttagggcaaggtattgctaatgctgttggtatggcaatggctgaagctcatttggctgctaaatttaataaaccaggctttgatttagttgatcattacacttatacacttcatggtgatggttgtttgatggagggtgttagccaagaagctgccagtcttgctggacacttaaaacttggtaaattggtccttctttatgattcaaatgatatctcacttgatggtccaacatctcaatcatttacagaagatgttaaaggacgttttgaatcatatggttggcaacatatcttagttaaagatggtaatgatttagaagcgattgctgcagcaattgaagctgctaaagctgaaactgataaaccaaccattattgaagttaaaactattattggatttggcgcagagaaacagggaacatcttcagttcatggagcgccacttggtgcagaaggtattacttttgccaagaaggcttatgtatgggaatatccagactttactgttcctgctgaagttgcagatcgatttgcctcagatcttcaagcgcgtggtgcgaaggcagaagaggcatggaatgatctttttgctaaatatgaagttgagtatccagaattagcaactgaatacaaagaagcttttgctggccaagctgagacagttgaactgaaagctcatgacctaggttcatcagtggctagtcgtgtttcaagccaacaagctattcaacaattatcgactcaattaccgaacctctggggagggtcagcagacctctcagcttctaataacacaatggtagcagcagaaacagatttccaagcaagtaactacgctgggcgtaatatttggtttggtgtacgtgaatttgcaatggctgctgcaatgaatggaattgcgcttcacggtgggactcgtgtttatgggggtacgttctttgtcttctcaaactacttgttaccagcagtacgtatggctgcacttcaaaacttgccaactgtctatgttatgacacatgattctattgctgttggagaagatgggccaactcatgagccaatagaacaattagcatcagtgcgctcaatgcctaatttgaacgttatccgtcccgcagacggtaatgaaacaaacgctgcatggcaacgagctgtatcagagacagatcgaccaacgatgcttgttttaacacgtcaaaacttaccagttcttgaaggaacatcagaattagcccaagaaggggttaataaaggtgcttatattttatcagaagctaaaggtgaacttgatggtatcatcattgcaacaggttcagaagttaaattagctttagatactcaagacaaacttgagtcagagggcatccatgttcgcgtcgtatctatgccagcacaaaacatttttgatgaacaagaggcttcatatcaagagcaagtgcttccatcagctgttacaaaacgtcttgctattgaggcaggatcaagcttcggttggggtaaatatgttggtttaaatgggctaacacttactattgatacttggggagcatcagcaccaggtaacagaattttcgaagagtatggctttacagttgagaatgctgtatcgctatataaagaactttaagagcatgaagaagttgggaaagatacctcaacttcttttttgtaagatataggatggatttgagaatagttttgatagactgataagtgatggaaagcactcttttttgaaaacgtttgacaaacattccatagcgcagtataattgataaaactattgtatatataaaataatacaactattattaattatctttttagaaaggtttgtttatgaagaaggagtgtcgtgatttttatcggcagatacagcatacttacaatgatatatctgtccgtgaagatgcagtgctatcatcaatactattatcagcatcgaatggtttgataaaaactagcgatgtacctcgtgttgcttatgagttaactcagcaattggaaaataatgagatagaaaaatctttcgagtcattagctacagttaaggaattgaaaaaatctgctaaaaaattgtctgagagatatgagcaaaataaggtaacaacgggattgctttctaaagtatttggaaatcattaggagataaaaggagatttttatgattaagtttgaacatgtttcgaaagtatacggagaaaaagaagctctcagtgatttaaccctctctgttaaagatggtgagatttttggattaataggtcacaatggagcaggaaaaacaacgacaattagtattctaacatctattattgatgcaacttatggccaagtctatattgatgacctacttttgacagaacatcgtgaccaaattaagaaaaaaataggttatgtaccggactcgccagatattttcttaaatttaaccgcagaggaatactggtactttttagctaaaatttatgacgttgccccagaagatattgaagcacgtatcacaaaattggtagacatatttgaactagaggagcaacgctataatcctattgaaagtttttcacatggtatgcgtcaaaaagtcattgttataggtgcccttcttccaaatcctgacatttggattctagatgagccgttaactggtttagaccctcaagcttcttttgatttgaaagaaatgatgaaagaacatgctaaaaatggaaaaacagttattttttcaacacatgtcttagcagttgcagaacagttatgcgacagaataggtattttgaaacaagggaaattaatctttgtcggtagcttaggtgagttaaaaatgaaatatccagataaagatttggaaactatctatttggaattagcaggacgtcaagctagtagggagggataaagtatgaattggtcacgtatctgggaactcgtaaaaattaatatcctttattcaaaccctcagactctatcggcactaagaaaaaagcaagaaaaacatcctaaaaaagaattttcagcttataaatccatgtttagaaatcagttatttcagattttgctcttttcaataatttatgtatttctctttgtatcacttgattttaaagaatatccgggctacttcacgttctacattggtatctttacactagtatccattatctactcttttattgcgatgtacagtgttttctatgagagtgacgatgttaaacaatatgcttatttgcctattaaatctgaagagctctatgttgctaaaatttttgcaacatttgggatgtctgtaacttttctaatgccaatcctaaccttaatgattgtggcttattggcgtataataggtggcccacttgcggtcctcctagcaatcataaattttgctattttatttttatcggtaacggtgatttcattgtatattaatagtttaataggccgtgccattattcgaagtgctaatcggaaacttatttctactatattaatttcactagctacatttggagcaatagttcccttattatttgtgaatatgacgagtcaaaagatggtacaagggaaattacaagatatcgctccaatcccttatgtcagaggttattatgatattgttacagcgccatttagtatggagagtctcctcaactattatctcccgctcttaatcattttattcttgataggtgctatttataaatgggttatgccacgctactatcaggagttgttgtatggacaggtcaagcagagaaaagtccatcgtcaaatcgattttagtaaacgtgagtcaattaataaaactcttgttaaacaccatttatcaagtttacaaaatgcgacattattgacaaatacatttttaatgccactattatatctagcaatgttcattgttccaattttgaataatggtaaagagattggtcgattttttaatgaaaattattttgggatagcttttctagcaggaatattaataggtagtttatgtgtgatgccagctagcattgtaggggtaggtatttctttagaaaaaagtaatttctactttataaaaagtttgcctatatcattttcgtatttcttgaagcataaatttgtaactttgataaccttacaacttgcagttcctacttttatttatttcttggtaggattctttctacttaaactatcaatcctcgttttattgagcttcattttaggtctagtcttcatgggacttatcgaaggccagtttatttatagacgtgactataaacatttgttcttgaattggcaagaggttacgcaactatttaatagagggttaggccaatggctgttagttggttcattgtttggaatgatgataataggtagttttcttattggaataagtattttttggtcaatggtatggaatactgtagctgtcaatatcataatccttatcattgggttgctcatattatcaatttgccaatacttactgctaaaaaatttttggaagaagcttgtttagtaaaaaggttttagaaaaatcatacagtaagaataatgcttaataactgagatagttatagcggataaaataaaggcttgttgtggactttacggttggaaggcagccactgtaatcctttgtttaataacgctagttttagctctaaaatatttgatttttattgctatctattatatcttatcagacaaagagactagggataacctagtctctttgtctgatgctaacttgtttttcgtaatattgtgctagaatgaatgtcaatatagcagttgtgcttacagtaatgataactgcaataagcatggtaataaaaagatgtgttgaagtatgactgatataaagaaacagacctggtagaccagaagagcctacagcgaagcggtgagcgttcattataccggcatagagtcctccaagaccaccaccaataagtgaggctattagaggataacgtttcggaaggttgacaccatataagataggttcggtgattcccatataagctgttatggcagcaggtccagcaatttctttaagttttttttcttttgttataagagtcaccactgtacctgcagttgcttgtgcgatatttgagcagagcatgcctggtccaaaaatagaatcaacccctaatttcgctagttgtgtgattcctaatgcagcaattccactatgaacaccaaacatgattaggataggagcaaatgctcctactagaaaagcaggtgcccaactggcgtatttggataaaaaagtaaaaataacagctaaatattggccagcgatagtacccattggtcccaatatagagaacgacaaaattcccatgctgagaaatattaacataggaacaagcactaaacgcagtgatttaggaataatttgctttaaatatttttctatataagcctgaacacaaataattagaataatgggaatgacacttgatgcatagttagtaagtgtgaatgggatcgtatggaataaggatactggtttaccagaagctactaaattagcccaattagggtgaaggagcatgacaacagttcccaaagctaaaataggattagctttcaatttttgagcagctgtgatggcgattaagataggtaaaaaatagaaaacaccatctgcaaaaagatttagtaatatatatgtttgagatgacggtgtcaagattttgaatactagtaataaagctagcaatgccttaatcataccagcgcctgataaagcaggtaaaatcggttggaaagtcccagaaacaaaatcaataattcgactaactgctttggcttttttggtttgttctattttagtcgttgagttagtttcaatgagggagttaatttcttcaaacacttttgcgacatgagtccctatcactatctgatgttgccctccgctgataacgacagtttttacctcttttaaagtttttaattgctcaaggtttactttcgtcggatcattgagactaaagcgaaggcgtgtttgacaatggtaaacattgttaatattattttgtccaccaaggtgtttgatgatattttttgacaaggtgatgtattctctagacataatatctccttaatacttataaaacgttttccgattctagattatagcatagtaataaaagaaaacacttggaaatgcttgtgaattttcaatgatgttttcagatagcatttctaaagggcctatgatataatttttttatgaaaagacattttgagacaactagaagaattgttattaaagtaggaaccagttccctcgtacagacaagcgggaaaattaatttaagtaaaatagaccatttagcatttgttatttctagtcttatgaatagaggcatggaggtgattttagtatcatctggtgctatggggtttggtttagacattttgaaaatggataagcgtcctcaagaaatatcacaacaacaagcagtttctagcgtaggacaagtagccatgatgagtctttattctcagatattttcgcactatcaaactcatgtttcccaaattttattaacacgtgacgttgtggtttttccagagagtttgcaaaatgtaacaaactcttttgagagtctgctctctatgggaattttgccaatcgtcaatgagaatgatgctgtcagcgtggatgagatggatcataaaacgaagtttggggataatgaccgtctctctgctgtcgttgctaaaattactaaagcagatttattaattatgctgtcagatattgatggtctttttgataaaaatcctaatatttatgatgatgctgttttacgtagtcatgtttctgaaatcaccgatgacatcatcaagtcagctggaggagcaggaagtaaatttggtactgggggcatgcttagtaaaattaaaagtgcacaaatggtgtttgataacaatggacaaatgatattgatgaatggcgccaatcctcgtgatattttaaaggtgttagatgggcataatattggaacttattttgctcaaggaaagtgagattgagttatgacgtatattgaaatattagggcaaaatgctaaaaaagctagtcaatcagtagcacgattaagtacagctagtaaaaatgagatactcagggacttagcgagaaacatagtggctgatactgaaaccattttgactgagaatgctcgcgatgttgttaaggcaaaagataatggtatctcagaaattatggtggaccgtctacgactaaacaaagaccgcatacaggcgatagcaaacggtatttatcaggtagcagatttggcagatccgattggtcaagttgttagtggttatacaaatttagatggtttaaaaatccttaaaaaaagagtgcctttaggggttattgcaatgatatttgaaagtcgtcccaatgtatcggtggatgcctttagtttagcttttaaaacagggaacgctattattttgcgtggtggtaaagatgctattttttcaaatactgccttggttaattgtatgcgccaaacattgcaagatacaggccacaacccagatatagtacaattagttgaagatactagtcacgttgtagcagaggagttaatgcaggcaacagactacgtggacgtcttaattccaagaggtggtgcaaaattaattcaaacggtgaaggaaaagtcaaagattcctgttatcgaaacaggtgttggaaatgttcatatctatattgatgaatttgcagatttagatatggcagctaagattgttattaatgctaaaacccaacgccctagtgtctgtaatgctgccgaagggttagttgttcatcaagctattgctaagggatttttatctcaattggagaaaatgctcaaagaatcgaaccagtcagttgaatttcgtgccgatgaggaagctttgcaacttttagaaaatgctgttgctgcaagtgagtctgattatgctactgaatttttagactatattatgtcagtaaaagtagtagattcttttgaacaagcaattagctggattaataaatacagtagtcatcactcagaagctatcattactaataatatcagtagggcagaaatttttcaggatatggtagatgcagcggcagtttatgttaatgcttcaacacgttttacagatggtttcgtttttggactcggagcagagattggtatttcgactcaaaaattacacgcgcgtggaccgatgggattagaagctttaacaagtacaaaatactatattaatggaactggtcaagtaagggaatagttgacctataataggagagattgcatttatcggtctctcttttacttttctaaagtttaggatttatggtacaattaaagttatgacaaacgattttcatcatattactgtgcttttgcacgagactgtggatatgcttgatattaagccggatggtatctatgtagatgctactttaggtggggcaggacacagcgaatatcttctttcacaattaggcccagatgggcacctttacgcatttgaccaagaccagaaggctattgacaatgctcatatacgtttaaagaaatatgtggataccggtcaagtaacctttatcaaagataatttcagaaatctatcttctaacttaaaagcattaggagtgtcggaaattaatggtatttgttatgatttaggtgtatcaagcccacagctggacgagcgtgaacgcggtttctcatataaacaagacgccccccttgatatgcgaatgaatagagagcagagtcttacagcttatgacgttgtgaacacttatagttatcatgatttagtaaggattttctttaagtatggcgaagataaattttcaaaacaaattgctcgaaaaattgagcaagtacgagctgaaaaaacaatatctacaacaacagaattggctgagattatcaaatcgtctaaatctgccaaagaactgaagaaaaaaggtcatccagctaaacaaatttttcaagctattcgtattgaagtcaatgacgaactaggagctgcagatgaatctatacaacaagcaatggacttattagctgttgatggtcgtatatctgtcatcacttttcattctttagaagatcgtcttactaagcaactttttaaagaagcatcaacagtagaagtacctaaaggtcttccttttataccagatgatttacaacctaagatggagctcgttaatcgtaaacccatcttaccaagtcaagaagaactagaagcgaacaatcgtgcccattcagcgaaattgagagtagcgcgtcgtattcgataataagaaagaaacttatgacaaatgaaaaacgaactgaagcagtaacacaaactttacaacgtcacatcaagactttctctcgtattgagaaagctttttatggtgctattgtaattactgctattatcatggcagtcggtattatttacttgcaaagtaatagtttacaagttaaacaagaagtaaatcaattaaatagtaaaatcaacgataaacagacagaatttgacaatgctaaacaagaagtaaatgagctttctaatcgtgatcgaattactaaaattgctaaagatgctggtttaacaattcaaaacgacaatatttatcggaaggtggactagtctgtgactttttttaaaaagctaaaaaaaatcttccttgattatgtgatccatataagagataggcgttcgccgcagaaaaatagggaaagagtaggtcaaaatctgatgattttaaccattttcctatttttcatttttatcatcaactttgtcatcatcgttggtacagatagtaaatttggggttaatttatccaaggaagccaagaaagtctatcaacaaagtatgacagtacaggcgaagcgtgggacaatttacgaccgtaatggaaatcctatcgctgaggatgctacgacctatagtctctacgctattatctcaaagaactatacgacagctacaggtcaaaaactatatgtacaaccttctcagtatgaaaaagtagctagtatcttagagaataaattgggcatgaagaaaaatcttgtcctaaaacaactcaatcaaaagaaattgtttcaagtttcctttggaagttcaggttcaggattgtcttataccaagatggctgacatcaagaaaacgatggaaaagtcagatatcaaaggaattggtttttctaccagtccggggcgtatttatccaaatgggatatttgcttcacaatttataggatttactcttcctcaggatgatggagatggaaaaaaattagttggtaatacaggccttgaagcggcacttaacaaggtattatcaggtactgatggtaaagtaacatacgaaaaagaccgtagtgggaatgttcttttaggtactgcaacaacagaacgtagggcggttaatggtaaggatatctacacaactttatcagagcctattcagactgttttagagactcagatggatgttttcgcagaaaaaaccaaaggaaaatttgcgagtgctacagttgtcaacgctaaaacgggtgaaattctagcaacgagtcagcgtcctacttataatccttctacccttaaaggttacgataagaaaaatttgggtacctataacacactactatatgataacttttttgaacctggttcaacaatgaaggtaatgactctagcctctgcaattgattctaagcattttaactctactgaagtgtataacagtgcacaatataaaattgcagatgcgattattcgagattgggatgtcaatgaagggttatcatctggtagttatatgacttttccacaagggtttgcacattccagtaacgttggtatggtaaccttggaacaaaaaatgggacgagataaatggttaaactatctttctaagtttaaatttggttacccaacacgttttgggatgcttcatgaaagtggaggtttgttcccatctgacaatgaagtaactatcgctatgagctcatttggtcaaggtattggtgtaacgcaagttcaaatgttgcgcgcatttacgtctatctcgaatgatggtgttatgttacaaccacagtttattagcagtatttatgatccaaatacagggacttctcgtacagcacgaaaagaagtcgttggaaaaccagtttccaaagaagcagctagtaaaacacgtgattatatggttactgttgggacagatccttattatggtacattatacgcagcaggtgccccagttattcaggtggggaatcaatcagttgcagtaaaatctggtactgcccaaatcgcccaggaaggtggtggtggttatctgcaaggaaaaaatgatactattaactcagttgtggctatggtgccatcggaaaatcctgacttcatcatgtatgttaccatccaacaacccgaaaaatttagtatcacattctggaaagatgttgttaatcctgttttagaacaagcaacagcaatgaaagaaacgatattaaaaccgggattgaatgactcagaacatcagacaaaatataaactatcaaaaatagttggtgaaaatccaggtcatgtagcggaagaattacgtcgtaatctggttcagccaattattttaggaaatggtagtaaagtttctaaagtatctaaaagaccaggagctaatcttgctgagaatgaacagctactagtattaacaaataaactgactgaattacctgatatgtatggttggtctaaagcaaacgttgaacagtttgctaaatggacaggtataaaagtgacctataaaggttcaacctcaggtaaagtaagaaaacaaagtattgatgttggaaaatccatcaataaaattaaaaaaatcaaaattacaataggagattaacatgtttttaagtataatggcaggtgtcatagcatttgtcctgacagttattgccattccgcgcttcattaagttttaccaattgaagaaaattggcgggcaacaaatgcatgaagatgtcaaacaacatctagccaaagcaggtacgccgacaatgggaggaacggtatttttgattgttgctcttcttgtctcacttatttttagtattattttatctaaagaaaatagtggtaatttaggtgcaacttttggtattttatctgttgttctcatctatggaattattggttttttagatgattttttgaaaatttttaaacaaatcaatgagggcttgactccaaagcaaaaaatgtcgctccaactaattgcgggtctaattttttattttgtccatgtgttaccaagtggcacatctgcgataaatatttttggtttttaccttgaagtaggatacttatacgctttttttgttcttttctgggttgttggtttttcaaatgctgtgaacctaacagatggaattgatggtctagcttctatttcggttgttatcagtttgattacttatggaatcattgcttataatcaaacgcaatttgatattttattgattatcgttatcatgattggtgctttacttggcttttttgtctttaatcataaaccagctaaagtctttatgggagatgttggttcacttgcattgggtgctatgttagcagccatttcaattgccttacgtcaggaatggaccttgctttttatcggctttgtctatgtttttgagacgtcttcagtgatgttgcaagtagcatactttaagtatactaagaagaaaactggtgttgggaaacgtatcttccgcatgacaccatttcatcaccatttagaattaggtggtgtgtctggcaaaggtaataaatggagcgaatggaaagtagatgcttttttatgggctattggtattttcatgagcgctattacacttgctattttatatctttaaactttattaggggatgtggtatggactgccagattcccttttgctttcttgtagcctttaatggtataatgaacataataatagtaaggaaatagacatgtcatttaaagattttaattttaaaccatacattcagagggctctcgatgagttaaaattcgtcgatccaactgatgttcaagctaaattgattccagttgttcgttcaggccgcgatcttgtgggggaatcgaaaactggttctggtaaaacccacacctttttacttcctatttttgagaagctagatgaaagtagtgatgatgttcaagttgttattactgcaccaagtagagagttgggaacacaaatttatcaggcaactaaacaaattgctgagcattcagagcaagaaatacgggtggttaactatgttggtggtactgacaaattacgtcaaattgaaaagttgaaagtaagccaacctcatattgtcattggaaccccaggacgaatttatgatttggtgaagtcaggtgatttagctattcataaggcgcatacttttgttgttgatgaagcagatatgactctagatatgggatttcttgataccgttgataagattgcagggtctttacccaaggatgtccaaattttagtcttttcagcaacgattccacaaaaattacagccatttttaaagaaatatttgaccaatcctgtaatggaaaaaatcaaaacagcaacagttatcgctgataccatcgataactggcttttgtccactaaaggacgtgataaaaatgcacaaattttggaactctctaaactaatgcagccctatcttgcaatgatatttgttaatacgaaagagcgtgcagacgaattacattcgtacctttctagtaatggcttaaaagtagctaaaattcatggtgggattgcacctcgtgaacgtaaacgtattatgaatcaggttaaaaacctcgaatttgaatatatcgttgcaacagatttagcagcgcgtggtattgatattgaaggtgttagccatgttatcaatgatgccatacctcaagacctatctttctttgtccaccgtgtcggtcgcacaggccgtaatggcttatctggtactgctataactttatatcagccaagtgacgattctgatattcgtgaacttgaaaaactaggtattaattttattcctaaagtcattaaaaacggtgaatttcaagatacatacgaccgtgatcgtcgtaataaccgtgaaaagtcctatcaaaaattagatacagaaatgattggacttgtgaaaaagaaaaagaaaaaaataaaaccaggttacaagaaaaaaattcaatggaaagttgatgaaaagcgtcgcaaagagcgtagagcaagtaatcgtgctaaggggcgtgcggagcgcaaagctaaaaaacaaagtttttaaaattattaaagtctgaaatcagctcgtttcaggcttttttattgatataaaatctttatcacctgataaggaaatactattatacagatagattttagagtgttagactagtaatatgatattttaggagaattcttatgtttaaaaaaataatattatctattgcaactatagccgcaaccgccagcctagcagtatcagttcaggcgtcagagaaagtagaacttaaagtagctacagattctgacacggcaccatttacttatcaaaaagacgggaaattcaaaggttatgatgttgatgttgtcaaagctgtttttaaaggtagtaagtacaaagtaaccttcaagacagttccttttgatactatttcaacaggtattgatgcagggaaatttgatttatcagctaatgatttttcatacaataaagaaagagcagaaaaatatctcttctcagatcctatatcccgttcaaattatgccgtagtagggaagaaggggagccattacaaatcattaagtgacctctctggaaaatcaaccgaagttttatctggcgttaactatgcacaggttctagaaaattggaataaaaatcatcctaataaaaaaccaataaaaatcaaatatgtttctgggacaactggtgttactagcagattaaaaaatattgagagtgggaaaattgactttatcctatatgatgccatttcatccgactatattgtaaaagaccaatcattaaacttaagcgtttctcctttgaaaggtaaaattggtaataataaggatggactagaatacctccttttaccaaaagataaaaaaggtaaaactctacagaaatttataaataagcgtattaaagttttgaaagaaaatggtactttggcacgtttaagtaaacaatatttcggtggagattacgtttcaaacattgataaataaatcagtgagactataagttttatctttttacatgtgagagtttgcgtgatagaataacggagataagaaagtttagaaaaggaaagtagaaggaatgaatcaatttatcttgacgggtggatggtcttggtataataatttggttagtcaggttccagcggggaaattatttagttggaaggctgttttagatgcaataccctcaattttagagcgattacccataacactattattgacagtagcaggagccttatttggactcattttagctttgatttttgcagtagtgaaaattaaccgtgtcaaaattttatatccgattcaagctttatttgttagttttttacgtgggactccaatacttgttcaattaatgctgagttattatggaattccacttttcttgaaatttttaaaccaaaaatatggttttgattggaacattaatgctataccggcttctgtatttgctattactgcatttgcttttaatgaagcggcttatacaagtgaaactatacgagcggcgattttgtcggttgatcaaggtgaaattgaggcagcacgtagtttagggatgacctcagcgcaagtttatcgtcgtgttattattccaaacgcagcagtagtcgcaacacctactttgataaacacgttaattggtctaactaagggaacctctttagcttttaatgctggtattgttgaaatgtttgcccaagcacaaattatgggtggtagcgattatcgctattttgaacgttatatctctgtggcacttgtttactgggcggttagtttcttaattgaacaattgggaaatgctattgaacgaaaaatggcaattaaggctccacgccatttaactgatgagattccaggaggagtacgctaatgataaaattgagacaattgactaaatcattttctggtcaaaaagtgttagacaaacttgatttagatattgaaaaaggtcaagttgttgctctagtaggtgcttcaggtgcaggaaaatcaacctttcttcgtagtatgaattatttagaagagcctgattatggaacaattgaaattgatgattttaaagttgattttaaatcaatcagtaaagatgacatactaacattacgccgtaagttagccatggtttttcaacaattcaatctatttgagcgtcgtacagctttggataatgtaaaagaaggtttgaaaattgtcaaaaagatgtcagatcaagaggcaacacggattgcaagagacgaactggcaaaggtcggacttgcagatcgtgaaaaatattatccaagacatttatcaggtggacagaaacaacgtgttgctttggcacgcgcattagccatgaaacctgatgttcttcttttagacgaaccgacatcagcacttgatccagaattagttggagaagttgaaaaatctattgcagatgctgctaagcaggggcaaaccatggtacttgttagtcatgatatgaattttgtttaccaagtagcagataaagttttatttttggaaaaaggtcgtattttagagtctgggacgcctgaacaattatttaaccatcctttagaagaacgtacaaaagaattcttcgctagttataacaaatcgtacctataagctaaaatattttgatataatgaaggttagaatgtctaatcttcatttttaattattcttgagttaggctaagtatataagaaagctgcgatatgttttgacaatcgcttgttggatagagatgtttttagaaatagcaaaagtttatttacaaggtttagggcttgccagcataactgttattttagttggtataatttgggtcttttggcgtgccaagaaaaacatagataaaacagctagagaacgccaatctgttctttatgatgtccttctgatagctcttatgacagctccaatacttgcctttgcatttgtagctatcattttaatgataaaagcttagtcagattagttggaaatatagacgctttgctatagaataaaaccataagattcaaaggagaaatagtaatgtatgatactttaataataggttcaggtcctggtggtatgacagcagcgctttacgctgcacgttcaaaccttaaagttgggttaattgaacaaggtgctccaggtggacagatgaataatactgctgaaattgagaactatccaggctacgatcatatctcaggtccagaattatcaatgaagatgtatgagccgttggaaaaatttgaagtagagcatatttatggtatagttcaaagagttgagaacgatggtgatgtaaagcgtgttatcaccgaagatgaatcgtatgaagccaaaacagtaatccttgctaccggagctaaaaacagccttttaggagttccgggtgaagaggaatatactagtcgtggcgtttcttactgtgcggtttgtgatggtgcatttttccgtgatcaggatcttttagttgtgggtggcggtgattctgctgttgaagaagctgtcttcttaactcaatttgctaaaagtgttactattattcaccgacgtgatcaattgagagctcaaaaagtacttcaagaccgagcttttgctaacgaaaaaataaaatttgtatgggattcagtggtcaaagagattaaaggaaatgagattaaagtatctggtgtaactgttgaaaatctaaagactggagaaatctcagagatgactttcggaggtgttttcatttacgttggtttgaaaccacattctagcatggtctcagaattaggtattacggacgagactggctgggtcttaactgatacaaatatgaaaacatcaattccaggactatatgctattggggatgttcgtcaaaaagatctacgtcagattgcgactgctgttggtgaaggtgctatcgctggacagggtgtctataactatataactgagcatttctaagaaatactaaaagtagaaaagactatcgaaaaacgattagtctttctttttattttcatgaaagtaaggtgataaactgaactaccgagatagaaatatgctataatgttagacatatagccttatcctaggctcatgattaaaaggagattgtctgatgtataaagacgatagtttaacactacatactgatttatatcaaatcaatatgatgcaagtttattttaataaaggtattcacaataaaagagcggtgtttgaagcttactttcgcaaggttccatttgaaaatggttatgctgtttttgcaggtttagagcgtattgttcgttatttagaaaatctgagcttttctgatagtgatttatcctatttagaagagttaggttatcctgaagaatttttagattacttaaaaaatttaaaaatggaactgactgtcaaatcagccaaggaaggtgaccttgtatttgctaatgaaccattagttcaaattgaaggtcctttagcacaatgtcagttagtagagacagcgattttaaatatcatcaactaccagacacttgttgctacaaaagcagctcgtattcgttctgttattgaagatgaaccgctattagagtttgggacacgacgtgctcaagaaatggatgcagccatttggggtactagggcagcgattattggtggtgctaacgcaacgagcaatgttcgtgctggtaaaatctttaatattccagtatcaggaacgcatgcacatgctttagttcaaacttatggcgatgattaccaggcatttaaagcttacgcagaaactcataaagattgcgtctttttagtggatacttatgatacccttcgtgtaggtgtgcctaatgctattcgagttgcaaaagagatgggcgaaaagattaatttcttgggagttcgccttgattcaggtgatttagcttatttgtctaagaaagttcgtcagcagttagatgacgccggttttcctaatgcaaagatttatgcttcgaatgatctagatgaaaatacaatcctcaacctaaaaatgcaaaaagctaaaattgatgtttggggtgtcggaacaaaattaattacagcctatgatcagcctgcgctaggtgctgtttataaaattgtttctattgagactgacgccggtagtatgcgagatacaattaaactatcaaacaatgctgaaaaagtatcaacacctgggaaaaagcaagtttggcgtatcaccagtcgagctaaagggaaatctgagggtgattacatcacatttgcagacactgatgtgacacaattagatgaaattgaaatgtttcatccaacttatacttatatcaataaaacagtccgtgattttgacgcagtacccttactggtagatatctttgacaaagggaaattagtttatcaattaccaagtcttcaagaaattcaagagtacggacgcaaagaatttgatcagctttgggatgagtataaacgtgttctgaatccacaggattacccagttgatttggcacgcgatgtttggcaaaataaaatggacctgattgatcgtatccgtaaagaagctttggcaaaaggagaagtaagatgactttgcaagatcaaattatcaaagaactcggtgtaaaacctgttattaatccaagtcaagaaatccgtcgttccgtagaatttttaaaagactatctattaaaacatagttttctaaagacctatgtactgggtatttcaggggggcaagattcaactttagcaggacgtctagctcaactagcagttgaagagttgcgtgctgatacaggggaaaactatcaatttatagctattcgtttaccatatggtattcaggccgatgaagaagatgcacaaaaagcattagattttatcaagccagatattgctttgaccattaatattaaagaagctgttgatggccaagttagagctcttaatgcagcaggagtagagattacagactttaataaaggaaatattaaagctcgtcaaagaatgattagtcaatatgcagttgcaggtcaatatgctggagcggttattggtactgatcatgctgcagaaaatattacaggttttttcaccaaatttggtgatggaggtgctgacttattacctctctttagacttaataaaagtcaggggaaacagttattagctgaacttggtgctgataaagccttgtacgaaaagattccaaccgcagatttagaagaaaataaaccaggaatcgctgatgaaatagcccttggagtaacctaccaagaaattgatgcttatcttgaagggaaggtggtttcggacaagtctcgaggtatcattgaaaattggtggtataagggtcaacataaacgtcatcttccaatcacaatttttgatgatttctggaaataagaaaaatagctagaatattctagctatttttgtttctctaataaattactttcagacttgcagaaatattcagaatgtttataatagtagctaagtataaaaggaggaatttatgtcaaaattaactcaaacatttacagataagttatttgctgattaccaagcaaatacaaaatttagcgctattgaaaatgcagtaactcacaatggtttattgaagtctctagagactcgtcaaagtgagattgagaacgactatgtcttttcaattgatttgaccaaagatgaagtttctaatcagaaacaatcaggacgttgctggatgtttgctgcactgaatacatttcgtcataaactgatttcagattttaaacttgagaattttgaattatctcaggcacatacatttttctgggataagtatgaaaaatcaaattggtttatggaacaaattattgcgactgcaaatcaggaattgagtagtcgtaaggtgaaattcctattagatgtacctcaacaagatggaggacaatgggacatggtggttgctctgtttgagaaatatggtgtcgttcctaaaacagtttatcctgaatctgtttcatcaagtgctagtcgtgaactaaatcaatatttgaataaactcttacgccaagatgcacagattctacgagaattaatagcacagggagcagatggggcaactgttcaaaataaaaaggaagaattgcttcaagaaatttttaactttttagcaatgaaccttggcttgccaccgcaatcttttgattttgcttatcgtgataaagacaatcattatcagtctgataaaaatattacaccgaaagcattttatcaaaaatatgttaatcttgacctatcagattatgtttctattatcaatgctccaactgtagataagccttatggacaatcctatacagttgagatgcttggaaatgttgtcggagggccagctgttaaatatttaaaccttgatatgaaacggtttaaagagttagcgattgcgcaaatgaaatcaggagaaactgtgtggtttggttcagacgtaggtcaagtatcaaatcgtcaaaagggtatcctagcaactacgacttatgattttaattcatctatggatattaaacttagccaagacaaagcgggccgcctagattatagtgaaagtttaatgacacatgctatggtcttaacgggagtagaccttgatgaatctggacaacctttaaaatggaaagttgagaactcttggggagagaaagttggtaaggatggttattttgtagcttcagatgcttggatggatgaatatacttaccaaatagtcgttcgtaaagaattgcttactaaagaagaattagaggcttacaacgcagagccaattactttagcgccgtgggatccgatgggagcattagctaattagtaatagtaattataaattaaaaaactggataatatatccagttttttaattaccgttaggtactgtattgttgttaccattaccattaccattaccatgtccagttcctggcacagtttgattggaattattaggggtagtagcattaccattattaggtgtttcgacttgtggggatgatgaattggcatcatttgctgtattcttatcctctttttgtttctcagaggatgttgaactactgctttgacttgactgtccagaattttgatagatattcttatagacagaagaagagtaagtgccggttgtagttgtcccattgatatacaagtagcttccgcttcgatagagcccttctggcattgtccaatctgcactgtatccgccagttaggtaggacatcattgcacgataaacctcagtagcaatatccagttggctaccataaagtggtgtaaggcgatttttataaccagtccaaattgccattgtgtacttagaagtatagccgacaaagttttcatcaggagccattgtaccaacggcgctattgtagataccagtagttgcttcaattttagctaactcatcttccgtatagttggaagtaccagtcttaccagcttgtgcaacaccagggatagctgctttagtaccagtaccaaatgttagtactgttttcagcatatccgtcatcatgtaggcagtagtctctttcatcgcacggctaccagacgctgcataagtatcattggttccatcgctaaattcaattttattaacatattgcggtttatagtaagttccgccgtttgcaaaagccgagtaagccgctgccattttctcactacttgcaccatattttgcatcactgctactgttgttacttgaaatagcatttgaatagttcatttctggatagtatatgcctaatttttcaaggaaagattttgcttcgtctaatccagcggcttcaagtgctctgacagcagggacgttacgtgattgttgaatagcggtctgcatactcatccaacccatatattgacgatcccagtcatatagttgagtagaagtaccaggccagtagtaaactgagtcgtttaatgattgacctgttgaattatagacaccactatcaatagcaggtgcataagctgagataggtttcattgtagaaccccaatcgcggtctgttaagacagattgatttgtcccaaatgaaatattttcattctgatgacgcccgcctaattgtgcaatgactttaccattagtcgcatccatgatggtagatgctatttgtaattcattgtttggataagcgatgtaagtgtcactgttgtagatgtcatatagttgtttttgtgcatcagtgttgatattagtatacacttttagcccagcagtaaagatatctttaccagttttttgtttaacttcactaataacttgttttaagtagttatccatatattttggataagtagatttttgctttaattcttttaagccatcagttactggagttgcaacagcttggtcgtattcctttttagaaatgtttttatcttgatacatctgctgaagaacggtattacgtcttgtttgagcagattctgggtttttataagggtcatattgtgtaggtgcttgaggaataccagcgagcaaagcaagttgtgcaatagataattcctttaggtctttaccaaagtatgatttagctgttgttctcataccataattcccatttcccatataaactttattaatatagaaagtaagaatttcttctttggtgtatttacgctccatttgaagcgcaagccaaacttcctgtgatttacgttttaacgtttggtcagatttattggtagaaaagtaagccagtttaatcaactgttgatcaagggttgaaccaccttgcgtattactactaacaagattatgccaagctgcacctaaaatacgataaatatcgacacctctatgtttaaagaaacgtttatcttcgatagaagtgatagcgttaaccaaatttagtggaatgctatccgcactaacactttcacgcttttctgagcctaaatcggcaataagtttattattaccatcataaaccaaactagagttaacggattttaaagcttgatcggttaatttcggagaacgactaacgtagtatgcaaataggagcccacctattacaatagctaagataataaatcccattataatgccaaaagcatacttcaatagtttgataacagattcctttttaattgtaatcaccgcctaataatttttcttcaataatatctaagtaagggacttgaggaaaggcactctcctttacgaaaaatccattttttctgatataatcaataggcattgatttattgcctttatcaatctgataaaatgaaattaactcattagcagggagtagataggtttccttaagtgtggaaaaatgaagcaagacaaagcaaatccctttttgctgtaatacatttgccatgtgctctatttggtgagcatgaaaatttttcataggcatagcagttttctgccgggtttctttggcttcaaagtcaatatagtaacctttgtaaacaccagaataatcagtagtagaagcttgtctaaaataagcttctacaatcttagcacgactacgtttaggataatctaccttgacgatttgtactggcgttggtttcttatgaatgacagctaattcgtgagacaaatagtagtcattggttgcattgatagcagcttcaaatgacataccacggttggcaaaatcgattttctttttctttgattttgtaactgttgttttccgaataagctgatgtggatagttaaccatttttctccttgcattacaaataaaatgctaagataagcaaaactattataccataaaattaggatggacaacaaatgaagtcaactattcttgtaacaggttacaaaaattttgaattagggattttccaggataaggatcctcggattactattataaaaaaggctattgataaggattttagacgcttcttggaaaatggagcagactggtttatttttatgggaaatttagggtttgagtactgggctttggaagttgctcttgatttacaaaaagaatatgattttcaaattgcgacaatttttacctttgagaaccatggccaaaattggaatgaggctaataaagctaagttggcactctttaagcaagttgactttgttaaatatactttcccaagctatgaaaacccgggtcaatttaaacaatacaatcattttctcattaacaacacacaaggtgcatatcttttttatgattctgaaaatgaaactaatttaaaatttttgctagaaatgatggagaaaaaggaagcttatgatatttctttcctaacttttgatcgcttaaatgaaatatatgaggaatgatcgttttttcggatatgagaacgttttacgcttgatttttccatttaatttaggtattatttactttgatataaaggataggacttatattaaaacgatttgactggtttggagaatagaatggcaagtattatttatagcccaaaagatatttttgagcaagattttaaagttagtatgcggggatatgacaagaaagaagtcgatgtatttctggatgatgtcatcaaagattacgaaaattatcttgagcaaattgagaagctccaaatggaaaatagacgtctacaacaagctttagacaaaaaagaaagcgaagcttcaaatgtaagaaattcagggacagctatgtataatcaaaaaccgattgcccaatctgcaaccaattttgatattttaaaacgcattagccgccttgagaaagaagtttttggaagacaaattagagaataaggatttctcaaatatgcaatttttggataatcgcgtagtattgagatactatgaggaaagtccatgctagcactggctgtgatgccagtagtgtttgtgctaggcgaaaaaataagcctagggagatagctagctatcttacggcaagcaaaagggctaagtctttggatatgcctgaatagctttgaaagtgccacagtgacgtagtttctagggaaatctagaaagtggaacgcggtaaacccctcaagctagcaacccaaactttggtaggggcatgggatagttggaatgagaacaatctatcctgactgctttgcagtagacagatgattatcgaaagaaacaattcctagttgtttctggaacaaaacatggcttatagaaaattgcataataggttagtggctgagataacatctcagccaatttttaactgtgatgaatacgatagtgtaaaagaggaaaaatgaaagaatcattcaaattaatagcaactgctgctgctggtttagaagccattgttggtagagaaatcagaaacctaggaattgactgccaagttgagaacggtagagtccgtttccacggagatatcaaaacaatcattgaaacgaacctatggctacgagctgccgatcgtataaagattattgtaggagagtttccagcacctacttttgaggaactttttcagggtgtatatggccttgactgggaaaattatttaccgttaggggcaaaatttcctattgctaaagcaaagtgtgtcaagtcaaaattgcacaatgaacctagtgtacaagccatttctaaaaaagctgttgctaagaaacttcaaaaagtctttcaccgtcctgaaggagttcccttacaagaaaatggagctgaatttaaaatagaagtttctattttaaaagataaagcgactgtcatgattgatacgactggatcaagtctcttcaaacgtggctaccgtgcagaaaaaggtggtgcaccaattaaagaaaacatggcagcagctattattcaattatctaattggttccctgataagccattgattgatccaacttgtggttcaggtactttttgtattgaagctgctatgattggaatgaatatagctcctggttttaatcgtgattttgcctttgaggcgtggccatgggtagatcaaagtcaagtacaaaaggttcgtgatgaagctgagagtaaagcaaactatgatattgatttagatatttcaggttttgatttagacggtcgtatggtagaaattgctagaaaaaatgcagaagaagcaggacttggagatgttatcaaattgaaacaaatgcgtcttcaagatttaaaaacagataaaattaacggtgttattatctccaacccaccatatggtgaacgactcctggatgacaaagcagtggacattttgtataatgagatgggacaaacatttgcgcctttaaaaacttggagcaagtttatcctaactagtgacgaaggatttgaaaaaaaatacggctcacaagctgataaaaaacgtaagctttacaatggtactttaaaagttgatttgtaccaatattacggtgaacgtgtgagacgtcaagtaaaataacggggagaactcatgtcagaagatcaaaaacacccattttttgaaccaaaaaaagaaactgatggtcttgaatttaaagatgctaaagaaatgacagtagaagaggctgttagaaaagattctgaaattaaggctggtattaccgaagaagatagtattcttgataaatacatcaaacaacatcgtgatgaagtagcttcacaaaagtttgagacaaaatcaagcgattttgcaaaccttgatacggcatctttagatgattttatcaagaaacagcgcgaagaattatcagcgatgttagctgcagaagagctttctaaaaagttggataattcagtctctcaagaacaagatacagaagctaatgctgtctcacctaaagaagaatcttcacaagaacaagaaaatagtgtaaccccagttcctcctctgaatacggaagcagaaccaactgcaacagaaccagattcgactattgctgattcagaggagtataaatcctcttctaagaagcgtggaggtatcgtaggaacattgattgctcttattttacttctaatagtagcaatctttggttacaactatttcaagaataataattcgacaaattctcaaactgcaacaagtcaaagttctagttctaaggctacgacgacttcatcagaagaagataaaaaagctagtcagaacttagataatttcaacaaatcttatgctaacttttttgttgatgataagaaaacccaactcaaaaatagcgaatttgataaattgtcagaattagaaaagaaagttgatgctttaaaaggaactaaatactacggtaaagtaaaagttaaatttgatagtctaaaacgtcaaattgatgctgttaaagctgttaacgacaagtttaagtcgcctgctgtagttgatggtaagaagagtgaaaaattagaggtaaaagatggagcgaattttgactctttagatagtaaaactcttaatactggtaatgctagtctagatagtttacttcactccatcgtttcaactggtcgtaatcaggtaaaacaatccgaagaacaggcttcgtctaataaggtttcagacactcaaataactgaacaaccaaacgtaactaacggtcaatcttcctcatcagctgctacaataaataatcaggcagctggcactgcatcaggtaatttggaacgtaaccgtagtcgagtaccgtataataatgctgctattgcggatacaggaaatcctgcctggatatttaacccaggagtattagagaaaatcgtggccacttcacaggcgcgaggctatttctctggaaataactatattcttgaacctgtaaatattatcaatggtaatggttattacaatatgtttaaattagatggcacttatttgttctctatcaatgccaagacaggttactttgtaggtaacgctcctggaagagctgatagtttagattattaatataaagaacaaaaccagttttttgtctacaccctaaaagttagaaaatcagtctaacgattagggtgttttttgtattcgcatttagatgtctacgactgctatgaggatattagggaaaaattaaaaggattttgctctctatgatacagaacaaaatcctttgtttaaattaataagtcaacttttggaattccaaaagttgacttttattttttattagatcagacaatgtggcgctcaaaagcattgtcagaaatcccttgggaaagaattaatttcgcccattcttgagcagagtggagactgtggtctttataatttccacaagattcaatggttgttccaggaacgtcttcccaagtgaccccaccagcaatagcctctagactagatttgatgactttagcaatttcagtagcatcctgttttccccacataatcatgtgaaaaccagttctacaaccaaaaggagaacaatcaatcaaaccattaattcgttggcggattaacttcgccagaaggtgctcgatagtatgtaaaccagcagtatcaatagcattttcattaggctgaataaggcggatatcaaagttagtaatgatgtctccgaccggtccaacttcttctgaaattaaacgaacgtagggtgctttaacgatggtgtgatctaattcaaaactctctacgacaacttcttttgtcataagttttctccttttgtattacattctagagactaaaggagatgttgaaaatttctcctaatccctttaaataacattctaatcatatcataaatgtctataattttaaattgtgaaaacgccttttttatgataaacttaaaagtggactttctatatgaaatctagaaaaaaattgaggtataaacatgtttaatattatattagcaatggtttgtgcactcattggtttgattattggttatgtggctatttcaatgaaaatgaaatcatcaaaagaagctgcagaactaactcttttaaatgcagaacaagatgccgttgatttacgtggtaaagcagaaattgaagcagaacacatccgtaaagcagcggaacgtgaaagtaaagctcaccaaaaagaattacttttagaagcaaaagaagaggctagaaaatatcgtgaagagatcgaaaaggaatttaaatctgatagacaagagttgaaacagatggaggcacgtttaacagatcgtgcatcatctcttgatcgtaaagatgaaaatctatctaacaaagaaaaaatgttagatagcaaagaacaaagtctaaccgataaatctagacatattaatgagcgcgaacaggaaattgctactttagaaacaaaaaaagtagaagaattgtcacgcatcgcagagcttagtcaagaagaagctaaagatatcattttagctgataccgaaaaagatttagctcatgatattgcgacacgtattaaagaagcagaacgtgaagtaaaagatcgatcaaacaagatagcaaaagacttgctagcccaagctatgcaacgtttagctggtgaatatgttactgaacaaacaattacaactgttcatctccctgatgataatatgaagggacgtatcattggtcgtgaaggacgtaatattcgtactctggaaagtttgacaggtattgatgttatcatagatgatacgccagaagtcgttgtcttatcaggtttcgaccccattcgtcgtgaaattgctcgtatgactttagaatctttgattcaagatggacgtatccatccagctcgtattgaagagttggttgaaaaaaatcgtttggaaatggatcaacgtatccgtgagtatggtgaggcagcagcttatgagattggtgcaccaaatctgcatcctgatttgataaaaattatgggacgtttgcagttccgtacatcatatggtcaaaatgtacttcgtcattcagttgaagttggtaaacttgcaggtattttggctggagaactaggagaaaatgttgatttagctcgtcgggctggattcctccatgatatggggaaagctattgatcgcgaagttgaaggcagtcacgttgaaattggtatggaatttgctcgtaagtacaaagagcatccgattgttgttaatactattgcaagccaccatggtgatgtagaacctgacagcgttattgcagtaattgttgctgctgcagacgcccttagttcagcacgaccaggtgcgcgtaatgagtcaatggaaaattatatcaaacgtctgcgtgatttagaagaaattgctaatggctttgagggagtgcaaaatgcctttgcacttcaagccggacgtgaaattcgtatcatggtacaacctggtaaagtttctgatgatcaagtagttattatgtcgcataaggtacgtgaaaaaatcgaacaaaacttggattatccaggtaatattaaggtaacagttattcgtgaaatgcgagctgttgattttgcaaaatagtcaaaaggagagcttgttagctctccttttgttatagagttgacatttgtcatattttgaaatgacaaaaatatctaaaaagtttacttctgattttttatactatgattatagtaaaggagaaccaaatggcaaaagatataattaaggttgatcatatatttaaaagcatcgggcaaaaaacgattttagaagatatatcatttagtatagcttctaaccaatgtgtagcattgattggacctaatggtgcagggaaaacaactctgatgtcaactttgttaggtgatattagtatttcttcaggatcattgacgatttttaatctgcctgcacaccacaataggttaaaatataaggtggccatcttaccacaagaaaatgtattgccctcaaagtttacagtgagagaactcattgatttccaaaggtgtttatttccagaagtgctgccaatgtctctgattttagactatctacagtggagtgatacgcacttgcaacaatttacagagactttatctggagggcaaaaacgacttttagcttttgttttaactttggttggtaagccccaattactatttttagatgaacctacttccggaatggatacttccacacgtcaacgattttgggagctgattgcgacactaaaaaaagaaggtgtcacaattgtctattctagtcattatatcgaagaggtagaacatacagctgataggattttagtacttcataaaggaaagttattacgcgatacaacccccctttgccatgaagcaagaaaaaaccgaaaagttattcaccgttccgcttagttatcaaaaattattacctacctatttgattacagagtgtgaagccaagagtgatagtataacgtttgttactggggaggctgaagctgtatggaaaatactggcagataatggttgtcctattgaagctattgagatgaccaatagaactttgttaaatcgtatttttgagactactaaggaggtaaaacatgagaatctttaaagcattattgaaaatggaatttcttttgacaaaacgtcaacttgccaatctcattatggctataggtatgccagtggctttttttctatttttttcaggatttatgggcgaaggactcactaaagccatcgaagctatctacgttcgtaattatatgataacgatggcaggattctcaagtcttagctttgctttttttacttttccattttctatgaaagatgatcaactctcaaaccgaatgcaattattaagacactcaccagtaccaatgtggcaatattatctagcaaaaattattcgtattttattttactattgcctagcaataactgttgttttcctaactgggcatattttaaggcaagttagtatgccaatagaacaatggatgcagagctttttattgctattaggaggagcaacatgttttattccttttggattgctcgtctcctactttaaaaatactgaactaatgtcaatggtagccaatatttgttatatgtcattagctgttcttggtggcatgtggatgccaattacaatgttcccaaaatggttgcaagctttatcaaagttaacccctacttaccatttgactcaagttatccttagtccgtttgctaatagttttgctggtttttctcttattattctgataggctatggtattataatgttagttatcgcttatctactatctcagaagaggcattcaatttgaaaaataaaaaaaataactatgatttaatgtattttattccgttagtatttttgatttaccccataggagggattctctattatcactaccctttttggactttattttttacgctagcttttgtaggagcatatttatactctgttattatcaggggcgaatcaaagtatcacatgattgcctggtctacaatgttgacatatattttctacatgacaatttttataaatagtggtttcatctggtatatttactttctgagtaatttactcgtctatcgctttagagataaattgaagtcttttagattcattagttttgcttgtactctagccacagtggtatttttatgcttctttaaggcatcagactttggtgatagaatcatgtttctaattgttcctattttttgtatcggttacatgtggattgctattgaaaatagaaatagcgaagaacaaagagaaaaaattgcagagcaaaatcagtatatcaatattttgtcagctgaaaatgaacgtaaccgtatagggcgtgatttgcatgatagtttaggacatacatttgctatgatgacactaaagacagaactagcgttaaagttgttagaaaaaaggaactatgataaggtacaaaaagaactatcagaattaaatcatattagtcatcaatcgatgagtgaggtccgtcaaattgtttctaacctcaagtatcgtacagtagtggaagaaattgatgagttgtaccgcttgtttcaattatctaacattaagttaacagttgttaataagttagagacgtcacaactaagtccagtaacacaatctacaatcacaatgatattaaaggaattatccaataatattgttaagcatgctgaagctgatagcgtggagttgagtttagtaaggcaaggtgctactataaatattgagatgattgataatggttgtggttttacaaaccttgacggagatgagttgcatagtattcaagagagattaactatcgttgaagggacactaacgattttgtcccgaagtaaaccaactcatattcaggtggtattgaaagaggtataagatgaaattacttgttgctgaggatcagtccatgctacgagatgctatgtgccaattacttttgatggaagaaagtgtttctactattgatcaagctggaaatggtggagaagctattgccattttatccaataaagccatagatgttgcaatattggatgttgagatgccgatattatcaggtttagatgtcttagagtgggttagaaaataccagaatgttaaggtcataattgtaacaacctttaagcggtcaggttatttccaaagggctattcgttcaaatgtagatgcttatgttttgaaagaccgctcagtagctgatttgatgaaaacgattcaaaaagttttatctgggggtaaagaatattcgcctgaattaatggaaaacgttatatctaatcctttgagtgagcaagaaataaaaattctttccctaattgctcaagggaagaccagcaaataaattgcatgcactttatttttatcgaatggtacagttcgtaattacacgtcaaatatttttgataaattaggagttaataatcgtttggaggcacttaaaatagcacgagaaaaggattggctgtgatagtttttttccagtcgagatgccataatgtattaagagggatgtatgtatgcaaaaatttaaagaacgttttgatacgcttagtgatgcaattttggccattgctatgacgattttagttttggagataaaaactccggctacgatgggtgatattggtgactttacacggaacataggtttatttattgttagctttgttgttgtttttaatttttggtacgaaagggcacaaaatagcctagatgctcaaaagactaatgatgaaattatagctcttgatatcattgaacacctaggtatttgtttgattcctctctttactaaatttatgatttcttttgagaatcataattttgctgttatggcttatggactcttaacgttattagttggtctcacatcagacattattcggattcgtttggcaagttatgatttagtgaccattcctagtgaattgaaagagcgggttataaaagtcatgacaacttttgccattcgttcagttgtggttcgctttatcatcattatcctcgcttattttctacctgaggtagggatatttgcatatttagtcataccgctctttatgttttggcgtcgctctagagcaggaaaatactatgctaaaaagggcattgaggcaccatcttatatcaagctttttatccaaattggagagagagctcctgaggattttactaattcaagtagtggaataggtggggtaaaaagactctataaaaaataataggagaccttgaaaaaaaggtttctttttgttaaactaatgagaagaaactttatttagggagcaatttatgaattgctataaaagttaatagttaaggtaagaaccagattgttctggtctttttaacacttaacacccgatctattaatttgaggagtgtgtaatgtctgaacgtggtttgctaattgttttctcaggaccatctggtgttggtaaggggacagttaggcaagaaattttttcaacccctgaccataaatttgattattccgtttcaatgactactcgtccacaacgcccaggcgaagttgatggagttgattatttcttccgtacacgtgaagagtttgaagcgttgattaaagaaggtcaaatgcttgagtatgcggagtatgttggtaactactatggaactcctttaagttatgtcaacgagactttagacaaagggattgatgtttttcttgaaatagaagttcagggagcgcttcaagttaaatcgaaggttccggacggtgttttcattttcttaacaccaccagatttagaggaattagaagagcgtttagtaggacgtgggacagatagtccagaagtgattgcccaacgtattgaacgtgccaaagaagaaattgctttgatgagggagtatgactatgctgttgtcaatgatcaagtgtcattagcagcagaacgtgttaaacgtgtcattgaagcagaacattatcgtgtggatcgtgttattgggcgttataccaacatggtcaaagaaactgataaaaaattaagttaaaaatagaaaagagaattgccttatgatgttaaaaccttctatcgacactttgttggataaagttccttcaaaatattctttagttattttacaagctaagcgtgctcatgaattggaagctggtgagaaagccactcaagattttaaatctgtgaaatcaacacttcgcgctttagaagaaatcgagtcaggtaatgttgtaattcacccagatccatcagcaaaacgtgcctcagttcgcgctcgtatcgaagctgaacgccttgctaaagaagaagaagaacgtaaaatcaaagagcaaattgctaaagaaaaagaagacggcgaaaaaatttaagcaagtcaaaagtgagaggttgaaacattctgtatcagcctcttttcatattttagagaattagggagggtttatggcaagaaaattagcacaggttattgttgatattcctctgatgcagacagataaaccattttcgtatgccattcctaaagatttggaagatttggtacaagtaggagtacgcgttcatgttccttttggaagaggaaatcgtcttttgcaaggctttgttgtcggtttcagagatgatgatgaattagagactaaggatattgcggaggtcctagattttgaacctgttttaaatcaggaacaactagacttagctgatcagatgcgccatactgtcttttcttataaaatatctattttgaaatcaatgttaccaagtcttttgaattcgcaatatgataaactcttgttagcaacagacacattaccatcagaagatagagaagatctatttggtcataaaacggaaattgtcttttcaagtttgtcttctcaagatgccaaaaaagcaggcagattaattcaaaaaggtttcatagaagttcaatatttagccaaagataagaaaacaataaaaacagaaaagatttacaaaatcaacagaactctgttagaaaagagccaaatagcagcaagagcgaaaaagagactggagttgaaagaattcctgttagaaaatcctcaaccagggcgcctcacagctttaaacaaacaattttcatctcctgtggttaattttttcagagaagaaggaatcattgaagtcattgaaaaagaagctagtagatctgataattattttaaaggaatcctaaaaacggattttttggatttaaatcaggaacaagctaaagtagttaaaatagttgttgaccaaattggtaaggaacagaataaacccttcttgttggaggggattacagggtctggtaagacagaggtatatcttcatatcattgataacgttttaaagttgggaaaaacagcgattgttctcgttccagaaatttctttaactccccagatgacgaatcgttttatttctcgttttggaaagcaagttgctattatgcactcgggcttgtcagaaggtgaaaaatttgatgagtggcgaaagataaaatcaggtcaagctaaagttgtcgttggagctcgttcagcaatttttgctcctttggaaaatatcggagccatcattatagatgaggaacatgaatcaacttataagcaagaatctaacccaaggtatcatgcgcgcgatgtggccttgctacgtgcagaatattataaagctgtgttactaatgggatcagcaactccaagtatcgaaagccgagctagagctagtcgggatgtttataaatttttagaattaaaacatcgtgctaatcctaaagcacgtattcctcaggttgaaattattgattttagaaattttattggtcaacaagaagttagtaatttcacatcatatttactagataaaatccgagatagattagataagaaagagcaagtggttcttatgctcaatcgtagaggttattctagttttattatgtgtcgagactgcggctacgttgatcaatgtcctaattgtgacatttctctgactttacatatggctacaaagaccatgaattgtcattattgtgggtttgaaaagcctattccaagaacatgtccaaattgcaatagtaaaagtatctcttactatggtactggaacccaaaaagcttatgaagaacttttgaaagttatcccagacgcaaagattttacggatggatgttgatacgacaaggcaaaaaggcggtcatgagtctattttgaagcgtttcggaaatcatgaagctgatattttattgggaacacagatgattgctaagggattggattttccaaatgttactttagttggagtactaaatgcagatacttctctgaatttacctgattttcgatcatcagagcgaacttttcagctattaactcaagtggctggacgtgctgggcgtgctgaaaaagaaggagaggttgtcattcaaacttataatcctaatcattatgctattcaattagcccaaaagcaagattttgaagctttttatcaatatgaaatgaatatccgtcgacaacttggttatcctccttattattttacagttggtttaacattatcgcataaagatgaagagtggttaatacgaaaatcttatgaagtattaagtttattgaagcaaggctttagtgataaagtaaagttgttaggtccaacgccaaaaccaattgcaagaacacataacctttatcactaccaaattattatcaagtatcgatttgaggacaaccttgaacttgttttgaatcgcttattagacatgactcaagacaaggagaatagagatcttcgcttagcaatagaccacgaaccgcaaaatatgatgtagaatagtgctatgatataattgagaaaagaaagacgaggaaaaagcaatgacaaaattattattcatggggacccctgatttttcagcgacggttttaaaaggtattttagcagatggtaagtatgatgttttagctgttgtgacgcaaccagatcgtgctgtaggtcgtaaaaaagaaattaaaatgacccctgtaaaagaagtggccttggaaaacaacattcctgtgtatcagccggaaaaactatctggaagtccagaattagaacaactaatgaccctaggtgcagatggtattgtaacagctgcttttggtcaattcttaccaacaaagcttttggaatcggtaggttttgcaattaatgtacatgcttctctattgccaaaatatcgtggtggggcaccaattcattatgccattattaatggcgaaaaagaagctggggttaccatcatggaaatggttgcaaagatggatgcaggggatatggtatcaaaagcttccgttgagataactgatgaagacaatgtagggacaatgtttgatagactcgccgttgttggtcgtgaccttttattagatacgcttccaggttatctatcaggtgatattaagccgataccacaaaatgaagaagaggtaagtttttctcctaatattagtccagatgaagagagaattgattggaataaatcatcgcgcgacatttttaaccatgttcgagggatgtatccatggccagttgcacatacccttttggagggaaatcgttttaaactttatgaagtaacaatgtcagaaggaaagggctcaccgggtcaagtgatcgctaagacaaagaactcattgacagtagcaactggtgacggagctattgaactcaaatcagttcaaccagcagggaaacctcgtatggatataaaagactttttaaatggtgttggtcgtaatttagaaataggagataaatttggcgaatgattggaaaaagagtgcgcgtggtttagctttaatgactttagaggaagtttttgataaaggagcttattctaatatcgcacttaataagagtttaaaaaaatctagactatcagataaagatcgtgccttagtaacagaaattgtctatggaactgtggctagaaaaataacgctagaatggtatctatcacactttatagttgatcgtgataagcttgaattatgggtatatcatctcttgctactgagcctttatcaactactctatctggacaacatcccagatcacgctattgttaatgatgctgtcactattgctaagaatcgaggcaataaaaagggtgctgaaaagttaattaatgccgttttacgaagagtaagttcggagacgctccctgaaattgcatcaataaaacgccaaaacaaacgttactctgttgcttattccatgccagtgtggctcgtaaaaaaattaattgaccaatatggtgagacaagagctttagctattatggagagtttatttgagcgaaataaagccagtcttcgtgtgactgacttatcgcaaaaacaaactatcaaagaaactttaaatgttagagattcacatattgcagagacagctttagttgcagactcaggaaattttgcatcgacatcatttttccaagatggcctcattactatccaagatgaatctagtcaattagttgctccaacactcaaagtctcaggtaatgaccaagtattggatgcatgtagtgcaccaggaggaaaaacaagtcatatcgcctcatatttgactacaggggcagtaactgctttagatttgtatgatcataaattggaattggttatggaaaatgcaaaacgcctaggtctgtcagataagataaaaactaaaaagttagatgcaagtaaagctcatgagtattttcttgaggatacttttgacaaaattttagtagacgcaccttgttcaggtatcgggctaattcgccgtaaaccagatattaagtacaataaagctaatcaagactttgaagcactccaagagattcaattgtctatcctatctagcgtttgtcaaacgctacgtaaaggtggtataataacctatagcacttgtaccatttttgaggaagaaaattttcaagttattgaaaaattcttagaaaaccaccccaattttgagcaagtagaactgagtcatacacaagaggatattgtaaagagaggctgtattagtataagccctgaacaatatcatacagatggcttttttattggacaagtcaaacgtatcttgtagtgtctaggaggaaactgacatcgtcagaaaaaaatatatggaaatatctcttttaacagatattgggcaacgtcgttccaataatcaagattttattaatcaatttgaaaataaagccggcgtcccactaatcatcttagcagatggtatgggaggacatcgtgcaggaaatattgctagcgagatgactgtaactgatctaggaagtgattgggcggagacagatttttctgagttatcagaaattcgtgattggatgcttgtctctattgaaacagagaatcgcaaaatatatgaattaggtcagtcagatgattacaaaggtatgggaactaccattgaagcagttgccattgtaggagataatattattttcgcacatgtaggagattcacgtatcggtatcgttcgtcaaggagagtatcatttattgacgagtgatcattctcttgttaatgaattggtaaaagctggccaattaacagaagaagaagctgctagtcatcctcaaaaaaatattattacgcaatcaattggtcaagccaatccagtcgaacctgatttaggagttcatctacttgaagaaggtgactaccttgtagttaatagtgatggactaactaatatgttgagtaatgccgatattgctacagtactaacacaagaaaaaaccttagatgataagaatcaagatttaatcactctagcaaaccatagaggaggtcttgataatatcactgtggcactagtttacgttgaaagtgaggcggtttaatgattcagattggcaaattatttgctggtcgttatcggatccttaaatcaatcggacgaggtggaatggcggatgtttatctagctcgagatctaattttagataatgaagaggtcgcaataaaagtattgcgaaccaattatcaaacagatcagattgcggttgctcgcttccagagagaagcacgagcaatggctgagctgacacatcctaatattgtcgctattcgtgatataggtgaagaagacggacagcagttcttagtaatggaatatgttgatggattcgatttaaaaaagtatattcaagacaatgcacccctatcaaataatgaagttgttcgaatcatgaatgaagtcctttcagccatgtcactggcacatcagaaaggtatcgtacaccgtgatttaaaacctcaaaatattttattaactaaaaaagggactgtaaaagttacagatttcggtattgcggtagcgtttgctgaaactagtttaacgcaaacgaattctatgttaggtagtgttcattatttatcgccagagcaggcgcgtggttcaaaagcgactgttcagagtgatatttatgccatgggaatcatgctttttgaaatgttaactggccatattccttatgatggggatagtgcagttactattgccctacagcacttccaaaaaccactaccatcaatccttgcagaaaataaaagcgttccacaagctttggaaaacattgtcattaaagcaacagctaaaaagctaacagatcgctataagacaacttatgagatgggacgtgatttatcaactgctctaagctcgacacgtcaccgtgaaccaaaacttgtttttaatgatactgagagtactaagacactacccaaagtaacatctacagtatcatctctaacgacagaacaactgttgcgtaatcaaaaacaggccaaaacaacagaaaaaataactcctgattctgcgagtaacgataaaacgaagtctaaaaagaaggcttctcatcgacttcttggtacaatcatgaaattattctttgcactctgtgttgtaggaataattgtatttgcttataaaattttagtaagtcctacgactattcgtgttccagatgttagcaacaaaacagtagctcaagcaaaaatgacattggaaaattctggattgaaagtaggagctattcgtaatattgagagtgatagtgtttcagaaggacttgtcgtaaaaacagaccctgctgcaggacgttctcgcagagaaggggctaaagttaatctttatattgccactccaaacaagagtttcactctaggtaattataaggaacataattacaaagatatcctcaaagatcttcaaggcaaaggtgttaaaaaatctttaatcaaggttaagcgtaaaattaataatgattatactactggtacaatcttagcacagtcgcttccagaaggaacatcttttaatcctgatggtaataagaaattaacacttacggttgctgttaatgatccaatgattatgcctgatgtaacaggtatgactgttggagaagtaatagaaaccttgacagacctcggattagatgcagataatcttgtcttctatcaaatgcaaaatggcgtttatcaaacagtagtaacacctccatcttcaagtaagatagcaagtcaggatccttattacggaggagaagttggattaaggagaggagataaagttaagctgtatcttcttggttctaaaacaacgaataactcatcatctacgccaatagattcttcggcttcaagctcaacaggaacaactacctcggattctgtaagctcatcaacggatgctagcacttctgatagtagtagcacttctacaagtagttcaacactaccaagtgatagtacaactaatacaggaacagctaacaatccattaactcaataaaattaaaaagaagatgttaaagtcttctttttaatttgctatggcagagaccatgcctagaaaggttctctgccaatatgccaaatttttctctcaataatggtgcaaagtatagggctttttgataaaatacgtcatatagagtaatggaaggattattatgaaaaaatttcagttttttctacttgttgaagccgttgtcttagttatgggattaatgaaaattttatctgatgactggacaagttttatttttattctcgctttgattcttttagccttaagattttataacaacgatagtcgtcataattttctgttaacgacaagtttgttattactatttttaatctttatgcttaacccttacattattgcagccgttgtttttgcagttttgtatgttctaatcaatcatttctcgcaagttaagaaaaaaaatcgttatgctttgattcaatttaagaatcatcaattagatgttaagacaacacgaaaccaatggttaggtactgatcaacacgaaagtgacttttatgcttttgaagatattaatattataagaatctctgggactgatacaattgatttaacaaatgttattgtatctgggcaggataatgttattataattcaaaaagtttttggtgatactaaagtattggttcctttagacgttgccgtaaaggctgatattagttctgtttacggtagtgtacagtactttgattttgaggagtatgatctaagaaatgaatctataaaattgtcacaagaggaagaatattaccttttgaaacgtgtcaaattagttgtaaacactatcgctgggaaagttgaggttagtcgtaaatgaaaaagcaccactactttttagctttcttctatggaagtgtcattatatttgccatttgttttgtcattattgatagtttgggtgttaatttggtgcacctctatcaaacgtctcgtttgtggctgattgaacaattgattttctctattttctttctatctttagcggtaactatccttttattgctaacttggtttttattagatgataatagtaaacgtcaaattaaccataatttacgtcgcattttaaataaccaatcaataaatgttaccgatgatggtactgaaatatcgaccaatattcaacggctctctaaaaaaatgaatttaatgacagcaagtctacaatctaaggaaaatagtcgtattttaaaaagccaagaaattgtgaaacaagaacgtaagcgtattgcacgtgatttacacgacacagttagtcaggatttgttcgctgcttccatggttttgtcagggatagcacagaatgtttctcagctagacgttgatcaggttggctcgcaattattagcagtagaagaaatgcttcagcatgcacaaaatgatttgagaattctgctacttcatttgaggccagttgaattagaaaataagaccctatctgaaggattcagaatgatattgaaagaattgaccgataagagcgacattgaagttgtttatcatgaatcaattctaaccttacccaaaaagattgaagacaatatttttagaattggtcaagaatttatcagtaatactttaaagcattcacaagccagtcgtctcgaagtttaccttaatcaaacagagaatgaattgcagttaaaaatgattgataatggtattggatttgatatggattctgtctatgatttaagttatgggttaaaaaatattgaagatcgagtagaagatttagcaggaaatttacagcttctcagtcagcctggtaaaggagttgctatggatataagattacctttagtaaatcagagtgaggataaaaatggataaaataaaaattgtacttgttgatgaccatgagatggttcgtctcggtttaaaaagttttttaaacttacaagctgatgttgaagtaataggtgaggcctcaaatggtttagaaggcataaaaaaagcactggagttacgtccagacgttgttgttatggacttagtaatgcctgaaatggacggtgtagaagcaaccttagcattattgaaggattggccagaagctgccattttagtcttaacatcttacttggataatgaaaaaatttaccctgttattgaagcaggtgccaaaggctatatgttaaagacctcaagcgcagcagagattcttaatgccattcgtaaagtttcaaggggagaacaagctattgaaaatgaagtagataagaaaattaaggctcatgataaatgtccagctttacatgagggcttaacagcaagggaacgtgatatccttaatttattagccaaaggttatgacaatcaaaggattgctgatgaattatttatctcgttaaagactgttaaaactcatgtttctaatattttgggaaaactaaatgtagcagatcgaactcaagcagttgtctatgctttccaacaccatttggtaccacaagatgatgaataagtgatataatagaggcactatgttaatgaaagtggttagtcatggacgcaaaaactaaatataaagcaaaaaaaataaaggcagtgttttttgatattgatgacacgcttcgtgttaaagatacaggttatatgccaccatcaatcttaaaagtttttaaagctttgaaagataaaggaatcgttgtaggtattgcttcaggaagagcacgatatggcgttccaaaagaagttcaagatttaaatgccgattattgtgtaaaattaaatggagcttacgttaaggacaaggataagaatattatcttccatcgtcctattccagctgaatatgtagagcaatataagaaatgggcggacactgttggtattaagtacggtttagctggtcgtcatgaggcagttttatcagatcgtgatgatttggtaaatgatgcgattgatattgtgtattctgatctcgaagttaatccagatttcaataaagaacatgatatttatcagatgtggacatttgaagataaaggagatagccttcatctacctgaaccgttagctgaacatcttcgcttgatacgttggcatgatcattcttcagatgttgtgttaaaaggaacatcgaaggctttaggtgtttctaaagttgttgaacatttgggcttaaagccagagaatatcttggttttcggagatgagctcaatgatttagaactctttgattatgctggactagctgtggcgatgggagtgtcacacccagaagctcaaaaaaaagcagattttatcacaaaaaaagtagaagaagatggcattttgtatgccctggaggaactaggtttgatagaaaaagaattaacatttccacaagtagatattgaaaatacagaaggtcctgtggctgtcattaaaacaaatcacggggatatgactgtaaaactcttcccggatcatgctcctaaaacggtagcaaactttattggtttagctaaacaaggttattatgatggtattatcttccatcgtattattccagattttatgattcagggtggtgatccaactggtacaggtatgggtggtgaatctatctatggggaaagttttgaagacgaattttccgaggaattatataatgttcgcggagctctttcaatggctaatgctggaccaaatacgaatggcagccaatttttcatcgtccaaaatacaaaaattccttatgcgaaaaaggaattagagcgaggtggttggccaacaccaattgctgagttgtatgctggacaaggtggtacaccgcatctagatcgtcgccacagtgtatttggacaattagtagaccaaagttcttttgaggtacttgatgagattgcggcagtagagactggttctcaagacaaaccattggaagatgttgttattttaacgattgaggttaaagaataaaatgaagattggcgataagttaaagggaacagtcactggcattaggccttatggagcctttgtttctcttgaggatggtaggactggacttatccatatttctgaaattaaaacaggttacattgataatatttatgatgttcttagtgtaggtgatgaagtctatgttcaggttatagatgtagatgaatttacacaaaaagcaagtttatcgcttcggacccttgaagaagagagacatcatattcagcatcgtcatcgattttctaacaatcgtcttaagataggtttcaaaccacttgaggaaaatttacctagttgggttgaggaaggtctagcctacttgaataataaataaacaaaaaacctagatttgattaatgacaagtctaggttttaaatatttaaaagtagcagtgaatattatacttgctaaaaatagcttgataatcgagtagatcctctgggtgtagtgcagcgatctcttccatttcatattgacgattaagtaattgatatttgttttgcccaaattggtggaaaggtaagagttgcacttgacggatatctaggcgatcaaataaacaagcaaattcttcagcatcttctaatgaatcgttaaaattaggtatgacaggaatacgtagcacaatcgttttaccgttggcaaaagcataatgaatgtttttgatgattgaagcattcttaaccatcgtcttttcttggtgtttgaggctattgtaatgttttaaatcggtgtaaataaaatcaacgtattggataagatctatgaattgttcatgtctagtataagcagttgtttcaatagccgtgtggattcccagtgatttagcacgttttaaaattgccttggcaaattcaaattgtgcaaatatttcaccgccagatagcgttatgcccccaccagattcttcgtaaaaatcaatatcttttaaaacttcttcaataatatcatcaaccgatttttcttcgcccacgatgacgctttcattagtaatggcatctctcattgtttctggaaccattttttgcgactcgggattagcacaccaaggacatctaagaggacaaccctttaagaaaacggttgttcgaatacctggaccatcgtgaatactaaaatgttgaatgttgaatacaatacctttttcatttgtcatattattttcctcaatttcattttaagtataccttttatacgtaacaaagtcaattacgaatgaaagtttattgaacttgtttaataaataaaaaatgataaaatagaaaggaggtgtttcatgaatagattagaaaatattattagtttagtatcccagtaccaaaaaatagatgttaatacactctcggagttgttgcaagtttctaaagtaacgatacgtaaagatttagataaactagaaggcaaagggcttttgcatagagagcacggttatgcagttttaaacagtggggatgaccttaatgttaggttatcttttaaccataaaactaaaaaagaaattgctgccttagctgcaaatatggtgtctgacaatgacactatcttaatagaatcaggctctacttgtgctcttttagcagaaaatatctgtcagacaaagcgaaatgtcactattttgaccaactcttgctttattgctaactatttacgagagtatgattcatgccaaattgtcttacttggtggtgagtatcaatcaagttcacaggttacggtaggtcctctcttgaaaaagatgatttcactttttcatgtctcgttagcttttgttgggactgatggttttgatccaaaactaggatttatgggtagagatttaatgcgttctgaagttgcacaagagatggcgaatgctgccgatgaagtcattattttaacagattctagtaagtttaatcagactgcattggtggaacagcttccgttgtcaactgtatcacaagttattacagataaacatccaaattcggaaattgctaatttgttccaagaagcagagattaccattcaatctttattacaagtaccataaaagaggctatttttcttacattttgcacatttgtggcgataatagataaagtgtcatgtcaaattgcacagatgtaacctttttgttaaactgaagcaaatgctgaaaggttatgagtatgaaattagagcgtcaaaaattgttagctaaagtagcttacctttactatatggaagggaaaagccaatctgagattgccaatgaattaggaatttatcgtacaacaataagtcgtatgttagccaaagcgagagaagaaggtcttgttagaatcgaaatttcagattttaatccagaaatttttcagttagaatcctattttaaaagtaaatatcaccttaaagatattgagattgtttcttcgcgaaaagatagcgatacttcagagatagagaaggatttagcacatgtagctgcagctatgattcgaaaaaaaattaaagagaatgacaaggtggggattgcttgggggaggacacttagtaaagtagttgaagcaatgcgtcctcatccggtttctcaagtttcttttgttcctttggccggaggtccaagtcatattaatgcacgctatcacgttaatactctggtttacgaaatgtcaaggcgtttccaaggaagttgtactttcattaatgcaactctagttcaagaaaacgctaatttagcgaaaggaatattaacttcaaaatattttgaggggctaatggataattgggaaaaacttgatgtggcaattgtgggcgttggtggtaaacctaaaagcaatgaacaacagtggcttgaccttttaaatcaagatgattttcaatgcttggatgaagaagcagctgtaggtgaaattacttgtcgtttttttaatcattcaggtgatcctgtgaatcaacatttagctaaaaggacaataggaattaccttagaacaactacagaaagttcctaatagaatagcggttgctcatggcaattataaggctgcggcactcttagccgttttaaaaaaggggtatattaatcatttagttactgatttttccacagccttaaatattttaagattagataaagacacctttgtggatactatatatcaaaagagctaggaataaatcctagctcttttgataatgtttctattaccaagtgaattgttatagaataagcacaaaggtgcgctattgtcataaagggcacaaagtctattgacgatgattaagggacatgttacatttgttttgcgaaagaaaactagaaccttttgtaagaaagtttaaacttataaaaaatcattaaagcggaggtgcttatggaaatcatagtcgcagaccaaattattatggggctcattttgaatgctggggatgctaaacaacatatctatcaagccttaaaacttgcaaaagaaggaaattttgcagaaagtaagattgaaatagaactagcagatagtgcactcctagaagctcataatcttcaaacacaattccttgcacaagaagcaggagggacaaggacagatatctcagcactctttattcattctcaggatcatttgatgacaagtattactgagattaacttgattaaagaaattattgatttacgccaggaattacatattcaaaaataagtaaaggggatcaaatatgataaaaattggtttattctgtgcagcaggtttttcaacaggtatgttagtaaacaatatgaaaatcgcagcggataaagaagggatagaggcacatattgaagcttattcacaaggaaaaattgcagattatgctaaagatttagatgttgcattacttggtccacaagttagctatactctagataaatcaaaatcaatctgtgatgaatacggtgtaccgatagcagttattccaatggcagattatggtatgttggatggtgtaaaagttttgaaacttgctttgagtttattggaaacaagaaaagaggcttgatatgtcaaagtttgatagtcagaaaataattactccgattatgaagtttgtcaatatgcgagggattattgcactcaaagatggcatgctagcaattctaccactaacagttgttgggagtctctttttaatattagggcagcttccatttaaaggtcttaatcaagccatagctaatgtttttggaccagaatggacagaaccatttatgcaagtttattcaggaacttttgcgattatgggcttgatttcctgttttgcaattgcttatgcttatgctaaaaatagtagtgtagaaccgttacctgctggcgttttatcactttcgtctttctttattttaatgaaatcatcttatattcctgtaaaaggagaagcaatagcggatgctatttctaaggtttggtttggcggtcaggggattattggagcaattattattggcttagtagttggtgctatctatacatggtttatccaacatcatattgttataaaaatgccagagcaagtaccacaggcaatagcaaaacaatttgaagctatgattccagcttttgttatctttcttttatcgatgattgtttatttgattgctaaggtaacaactggaggtacctttattgagatgatttatgatatcattcaagtaccgttgcaaggcttaacaggctcactttatggagcaattgggattgctttctttatttcattcttatggtggtttggtgtccatggccaatctgtggtgaatggtattgtgactgctttgttactatccaatttagatgccaataagtctttattagcagcaaatcgcttaacattagataatggcgctcacattgtaacacagcagtttttggatagtttcttgattttatcgggctcaggaataacttttggactagttattgcgatgctttttgcagcaaaatcaaaacaatacaaggcacttgggaaagtggccgcttttcccgcaattttcaatgttaacgagccaatcgtctttggctttccaatcgtaatgaatcctgtgatgtttctgccttttattttagtaccagttttggcagctttaattgtttatggagctattgcggttggttttatgcaaccattctcaggtgttactttaccatggagtactccagcaattatttctggattcatggtaggtggttggcaaggtgcactcgtccaaatagtcattttagctatctcaactgctgtttacttcccattctttaaaatccaagataatattacttacaaaaatgaatgtgaaatggaaaggggatagctagcagataagaggttgaggtgtgtaatgcaccttaacctttttctaaaaatgcacatttgtgcaactttagatgtagcattctattctttattttcttcttgttattttaggatttaggtgctattatatttacgaagaaaaactttttagtttcgaaagaaacaagcggaggctgttatgaccaaacaattactcactcaaaaatatacaaatgatgttcaacaaaattctcaaaagcattttggctatttgacagagcgcatgtattcttatcgcgataaggttcttgataagaaaccattcatagatgcagaacgtgctatcttggtaactgaagcctatcaaaagcatcaggaaaaacctaatgttttaaagagagcttacatgttgcaaaatattttggaaaaaatgacaatctatattgacgatgagacaatgattgtcggtaaccaagcttcatctgataaagatgctcctatttttccagaatacactctagaatttgttgtaaatgaactagacctttttgaaaaacgagatggtgatgtcttttacattacagaagaaaccaaagaacaaattagaaatattgcacctttctgggaaaataataatttacgggctcgtgcgggcgttatgcttccagaagaagttcaagtttatatggagacaggcttctttgggatggaaggtaagatgaattctggggatgctcacttagctgtcaactatcagaagttactagaagaagggcttattggctttgaaaaaaaagcaagaaaagctaaagctgacttagatttaacaaagcctgagagtattgacaaatatcatttctatgattctattttaattacaatagaagctgttaaaacctatgcagagcgttttgctatcctagcaaaaaaacaagctaaaacagcaaatgctaagagacgtcaggaattgttagatatcgctagtatttgtgaacgagtgccctattacccagctgaaacgtttgcagaagccgttcaatcggtttggtttattcagtgtattcttcaaatagaatcaaacggtcattctctatcttatggacgctttgatcaatacatgtatccatatgttaaatctgacttagaagctggacgtgagactgaggattcgatcgttgagcgcctaactaacctatggattaaaacaataactattaataaggttcgtagccaagctcatacgttttcgtctgctggtagtcctctttaccaaaatgtaacgattggaggacaaacacgacataaggaagatgctgttaatcctttatcatttctagtactaaaatcagtcgctcagacacacttaccacagcctaatctaacggttcgttatcatgctaacctagacaagtcattcatgaatgaagctattgaagttatgaaattaggctttggtatgccagcttttaataatgatgaaattattattccatcatttattaaaaaaggagtttccgaagaagatgcctatgattattcagcgattggttgtgtcgaaacagcagttcctgggaaatggggttatcgttgtaccggcatgagctatatcaacttccctaaagtgttattaattacaatgaatgacggtattgacccggcttctgggaagagatttgcgccttcttatgggcatttcacccagatgacctcatataaagaacttaaagaagcttgggacaaaacacttcgttacttaactcgaatgagcgttattgttgaaaatgctattgatattagtctcgaaagagaagtacctgatattctttgttcagctttaactgatgattgtattggacgaggtaagcacttaaaagaaggtggtgcagtatatgactacatatctggtctacaagttggaatcgctaatctttcagactcacttgctgcgcttaaaaaattagtatttgaagaaaaacgcctaaccacattagaagtatggcaagcattgcagagtgattacgcaggtccgcgtggtgaagaaattcgtcaaatgttgatcaatgaagcaccaaaatatggaaatgatgatgactacgcggatagtttagtacgtgagtgttatgatgtttatgttgaagaaattgctaaatatcccaacacacgctatggacgtggaccaatcggtggtattcgctattcaggaacgtcctctatttcagcaaatgtaggccaaggacgaggtactttagcaactccagatggtaggcatgcaggaactccattagctgaaggttgttcaccatctcataatatggacaaaaagggacctacctctgttttgaaatcagtttcgaagttaccaactgatgagattgtcggcggtgtactccttaaccaaaaagtcaaccctcaaaccttggcaaaagaagaagataaacaaaaattaattgccttacttagaacattcttcaatcgccttcatggttaccatatccagtataatgttgtctcacgtgagactttgattgatgctcagaagcaccctgaaaaacaccgcgatttgattgtgcgtgtagcaggttattctgcattctttaatgtcctatctaaggcaactcaagatgatattattgcacgtacagaacatgctctttaggagattattatggaatttttacttgacactttaaatttagaagctataaaaaaatggcatcatatactgccactagcaggtgtaacttcaaatcccaccattgctaagaaagaaggagatatacattttttccaacgcattcgtgatgttcgagaaattattggacgtgaagcaagtttgcatgttcaagtagtggccaaagattatcaaggaatattggatgatgctgctaaaatacgccaagaaacggacgatgacatttatatcaaagtcccagttacgccagatggattagcagcaattaaaacgttaaaagcagaaggttataatattacagccacagcaatatacaccagtatgcaaggtcttttggctatatcagctggagcagactacctagcaccttactttaaccgaatggagaaccttgatattgatgcgacacaagttattaaggaattagcgcaagcaatagagcggacaggttcttctagcaaaattttagcagctagttttaaaaacgcttcacaagtaacgaaggccttatcacagggtgctcaatcaatcaccgcgggaccagatatttttgaatcagtctttgcgatgccatctattgcaaaagctgttaacgactttgcagatgattggaaagccagtcaacactcagaacatatttaacagagaacgccaacttttgaggctgtatctttaacataaaattttttaaagaagaaagaggttgagaatgaaagttttcgcaagtccatcgcgctatatacaaggaaaggatgctttattccaaagtattgaacatatcaaatctttaggtcagactccacttatcctttgtgatgatgttgtttataatatcgttggagaaaggtttttatcttatctacaagacgatttgttaccacatcgtgtttcctttaacggagaagcatctgataatgaaatcaatcgtgtcgttgctgttgcgaaagaaaagaatagtgaccttattattggacttggtggtggaaaaactattgactctgcaaaggcaattgcagataaagttaatttaccagtggtcattgcaccaacagtagcttcaacagatgccccaacatcagcgttatcagtaatctatacagatgaaggagcttttgaaaaatatattttttattcaaagaatccagacttagttttagttgatactcaagtaattgcccaagcgccaaaacgtttactagcttctgggatagcagatggcttagctacttgggttgaagcgagagcagtcttacaaaaaaatgggatagcgatggctggcggtagacagactttagcgggcgtggcaattgcccaagcatgtgagcgtactttatttaatgatagtttacaagctttagcggcttgtgatgccaaagtggttacaaaagctttagaaaatgttattgaagctaataccttacttagtggtttaggttttgaaagtgcaggattagctgcagctcatgctattcataatggttttactgccttgagtggagatattcatcacttaacccatggtgaaaaagttgcctatggaacgttgacgcaacttttcctcgaaaatagaccaaaggaagaaattgatcgctacattaatctttaccaagcgattggaatgccaactacacttgcagaactccatttgggtgatgcaacatatgaagaacttttaaaagttggtcagcaagcaacaattgaaggtgaaacaatacatgaaatgccattcaaaattagtgcagaggatgtcgctgcagccctgttaacggttgaccgttatgtttcaaatcatcaataaaaacaatagaaccaagtgaaattgcttggttctatttgtcgttttaatattttaactaaatagggcttactagtatttaaagagatataaactaaaaaagatcagacaacatatctaatcttttttagttatcgtttactgaagattaaagttattcaaaatcatacaggcttgttgataagtaacgttcgccattatcagggagaagagctaaaacctttttcccttttcctagttgtttggccacttcaatagcagcataaatagcagctgaagcagaaattcctgcgaggaaaccttctagtccgccgatgatacgtcctgtttcaatagcatcgtcagatgtaacgcgaatgatatgatcataagaatctgtagccaatgtttctggaatgaaacctgcagaaatcccttgtattttatgaggcccaggttgctcaccagaaaggattgcagattcatcagcttctacagcataaatagcgacatcaggattgactttttttaatgcacgagagacaccagtaattgtcccaccagttcccacacctgcgataaaagcatctaaacctttttcaccaaaagtctcgataatttccctaccagtcgttttttcgtggatttctggattggcttgattattaaattgcaggggtagccaagcattttgctctgcagaaatttcttttgccttagcaatagctcccttcatcccttcactaccaggtgttagtactaattgagcaccataggcttgaatgattttacgacgttcaattgacatggtttctggcataacaataataacattataccctttagcttttcctacccaagccaaaccgatacctgtattaccagatgtaggttctacgattgtatctccggctttaagaatccctttttgctctgcatcttcaatcatagctagagcgatacgatctttgacagatgaacctgggttaaaggattctaacttaacgtacacctctgcagctccttctggaacaatatgatgtaattgaataatgggtgtatttccgattaagtctgtaatagaattataaatttttgacataagctatacctcttcatgatattggttaagaatattataaaactcacattgattaaagtaaaatatcaattctttatcaagtgatagctattatttatcggtttcagccttaaagggaatttcaacaatttgactcccttcttcagttaacaaagcttttccttggtagaactctgtcaaattagttattgtgtgttcaaattccttagggtcaacgtatattttacaggttacagcttctaaaaattctgtttcaaactcctgaaggtggtgctcttttaggaagttgtcaaaagtttgatattgaggataagttaattgaatacgaataccaatttgttctttaacttctactaccccgatctctttgatggtattagctacgctaccagagtaggcacgaataagcccccctgcgcctaatttgatacctccaaaataccgtgtaacgacggcaacaacatttgtcaggccttgcttttcaagtacggttagcatagggatacctgctgtaccactaggttctccatcatcactagatcgttttatatcccctttttcgccaataaccatagctgaacacgaatgattggctttgtagtgcgctttcttgatttgcgtaatataattacgcccctcctcttcggactctactcgctttagatgacaaataaatcgcgattttttaatttcttcttcgacaattccgtctgattttatcgttttatagttcatagagaaattctacaaaaattcttcaaatttagcaaaaaaatccgaatgaaataatatggaaaattatttaggtaggctttggacaaaagcacaattatctgagcaacttagaaaaattgcaattagcttgccatcttttataaagaaaggaagcgactatatttgtacccgatgctctagttctgttgctaaaaattgccaattaccaactggaaattattattgtagagaatgtatagtttttggaagagttactagtaatgaaaatttatattatttcccacaaaaaacattttctaaaacgaattctttaaaatggaaaggggaactgacaccttatcaaaatgaggtttcagaagagttgttgaaaggtatttcaagtaaggaaaatcttcttgttcatgctgtgacaggggctggtaaaacagaaatgatataccactctgtcgccaaagtaattgatactggaggaagcgtttgtattgccagtcctagaattgatgtttgtttagaattgtataagcgactttcaaacgattttagatgtgccataacattaatgcatggagaatctccttcttatcagagatcccctttaactattgccacaacacatcaattgttaaaattttatcatgcttttgatttgctaattgttgatgaagttgatgcttttccgtatgtcgacaacccgatactataccagggtgtaaaacaggccttaaaggaaaacggaacaagtatttttctgactgcaacttcaacgactgagttagaaagaaaagttgcaagaaaagaactaaaaaaattgcatctagctaggagatttcatgccaatccgttagtgatacccgagatggtttgggtaagtggtatccagaaaagcttgcagacacaaaaactacctcccaaattatatcagttgataaataaacagcgacaaacgagatatcctttgttattatttttcccccatatttcagaaggtcaggtattcaccgaaattttaagacaagcctttcctatggaaaaaattggttttgtttcaagtaagagcacatctaggttaaagttagtgcaagattttcgagataacaaattgtctatcctagtgtcaactaccattctagagagaggagtaactttccctagcgtcgacgtttttgttatacaagcaaatcatcatttgtttacgaaaagttccttggtacaaatttcaggaagagttggaagagcattagaaaggcccgaagggctcctttacttccttcatgatgggaaaagtaaatcgatgcaccaagctataaaggagattaaaaacatgaatcatataggaggattttaatgacttgtttgttatgtcatgaaatagatttatcgcaattaacttttgtggaacttatgcttctaaaaccaaagcaaaacgtaatttgtcaaacgtgcaagggtagttttgaagcacttagtagggagatgggttgccaaacatgttgcaagcaaattccccaaaaacaatgtcaagattgtatttattggggtaaaaaaggtatagaggtaaatcatttttccctttatagatacaatgaagcaatgaaaaaaaatttttctctttttaaatttcaaggggattatttgttgaaagatgtttttacaaaagaaataaaagctgctctaaaaaagtataagggctacactatagtgccagttcccttgagtcatgaaggataccaaaataggcaatttaatcaagtgattgcttttctacaatcggcaaatataccttacaaaaatattctttctaaaaaagatggaggtaagcaatcggctaataataaagaagaaagactcaaacaagttcagcaatttacattaaaaaatgaggctgagttaggggacaaccttttaattgttgatgatatttatacaacaggcgcaacaatagcacaaatcaggaaactattagaagaaaaaggtataaaaaatataaaaagtttttcattagcacgctaaaatcttgcaaattttcatgaaagcggttataataagagtatagaaagcgttaacaacgcaagaaagaggtactcatatgattaaatacagtattcgtggtgaaaacatcgaagtaacagaagctattcgtgagtatgttgagaccaaactctctaaagttgaaaaatactttaatgaagcacaagaattagatactagagtcaacctcaaagtatacagagagaagaccgcaaaagttgaagtaacaatcttaatagattctattactttacgagcagaagatgtttcacaagatatgtatgggtcaattgacttagttgttgataaaattgagcgtcaaattcgtaaaaataaaactaaaattgcgaaaaaatatcgtgaaaagattccagcaagtcaagttttcacaacagaatttgaggctgagccagatgaagaagcagtaagccaaagaattgtacgtactaagaatgttaatctaaaaccaatggatgttgaggaagcattgttgcaaatggaacttttaggtcatgatttctttatctatacagatgcagaagataatacgacaaatgtcctttacaagcgtgaagatggcgaactaggtttaattgaagctaaaggaaattaactttgtaacataatttaaaaaatctcagggttttctctgagatttttttaaaacctattgacaacaaataaaaaattatagtatactaaatgagttcttaagcgaacctaatattgtattatcattttataaacaacttaaaaaaagtagttgacaaagcagaataagtttgctagaatatagaagttgtctcaagagaggcaaagacctttgaaaactgaacaagatgaacgaatgtgcagggtggatttacattgtaaatccgtcaatgacaaaaaacaataaatctgtcagcgagacagaaaagagcaaagctcaaacttttaatgagagtttgatcctggctcaggacgaacgctggcggcgtgcctaatacatgcaagtagaacgctgaggtttggtgtttacactagactgatgagttgcgaacgggtgagtaacgcgtaggtaacctgcctcatagcgggggataactattggaaacgatagctaataccgcataagagtaattaacacatgttagttatttaaaaggagcaattgcttcactgtgagatggacctgcgttgtattagctagttggtgaggtaaaggctcaccaaggcgacgatacatagccgacctgagagggtgatcggccacactgggactgagacacggcccagactcctacgggaggcagcagtagggaatcttcggcaatggacggaagtctgaccgagcaacgccgcgtgagtgaagaaggttttcggatcgtaaagctctgttgttagagaagaacgttggtaggagtggaaaatctaccaagtgacggtaactaaccagaaagggacggctaactacgtgccagcagccgcggtaatacgtaggtcccgagcgttgtccggatttattgggcgtaaagcgagcgcaggcggttctttaagtctgaagttaaaggcagtggcttaaccattgtacgctttggaaactggaggacttgagtgcagaaggggagagtggaattccatgtgtagcggtgaaatgcgtagatatatggaggaacaccggtggcgaaagcggctctctggtctgtaactgacgctgaggctcgaaagcgtggggagcaaacaggattagataccctggtagtccacgccgtaaacgatgagtgctaggtgttaggccctttccggggcttagtgccgcagctaacgcattaagcactccgcctggggagtacgaccgcaaggttgaaactcaaaggaattgacgggggcccgcacaagcggtggagcatgtggtttaattcgaagcaacgcgaagaaccttaccaggtcttgacatccttctgaccggcctagagataggctttctcttcggagcagaagtgacaggtggtgcatggttgtcgtcagctcgtgtcgtgagatgttgggttaagtcccgcaacgagcgcaacccctattgttagttgccatcattaagttgggcactctagcgagactgccggtaataaaccggaggaaggtggggatgacgtcaaatcatcatgccccttatgacctgggctacacacgtgctacaatggttggtacaacgagtcgcaagccggtgacggcaagctaatctcttaaagccaatctcagttcggattgtaggctgcaactcgcctacatgaagtcggaatcgctagtaatcgcggatcagcacgccgcggtgaatacgttcccgggccttgtacacaccgcccgtcacaccacgagagtttgtaacacccgaagtcggtgaggtaaccttttaggagccagccgcctaaggtgggatagatgattggggtgaagtcgtaacaaggtagccgtatcggaaggtgcggctggatcacctcctttctaaggataaggaaacctgccatttgcgtcttgtttagttttgagaggtcttgtggggccttagctcagctgggagagcgcctgctttgcacgcaggaggtcagcggttcgatcccgctaggctccattgaatcgaaaggttcaaattgttcattgaaaattgaatatctatatcaaattccacgatctagaaatagattgtagaaagtaacaagaaaataaaccgaaaacgctgtgaatatttaatgagttttctagttttaaagaaactaggttaataaggttaagttaataagggcgcacggtggatgccttggcactagaagccgaagaaggacgtgactaacgacgaaatgctttggggagctgtaagtaagcgctgatccagagatgtccgaatgggggaacccactagttaatgactagtatccatatctgttaaggatatgagaaggaagacgcagtgaactgaaacatctaagtagctgcaggaagagaaagcaaaagcgattgccttagtagcggcgagcgaaacggcaggagggcaaaccgaagtgtttacacttcggggttgtaggactgcgatataggattaatcattatagaagaattacctgggaaggtaagccaaagagagtaacagcctcgtatttaaaatgatagattaaccttagcagtatcctgagtacggcgagacacgcgaaatctcgtcggaatctgggaggaccatctcccaaccctaaatactctctagtgaccgatagtgaaccagtaccgtgagggaaaggtgaaaagcaccccgggaggggagtgaaatagaacctgaaaccgtgtgcctacaacaagttcgagcccgttaatgggtgagagcgtgccttttgtagaatgaaccggcgagttacgatatgatgcgaggttaagttgaagagacggagccgtagggaaaccgagtcttaatagggcgtcatagtatcatgttgtagacccgaaaccatgtgacctacccatgagcaggttgaaggtgaggtaaaactcactggaggaccgaaccagggcacgttgaaaagtgcttggatgacttgtgggtagcggagaaattccaaacgaacttggagatagctggttctctccgaaatagctttagggctagcgtcgatgttaagtctcttggaggtagagcactgtttgggtgaggggtccatcccggattaccaatctcagataaactccgaatgccaacgagatataatcggcagtcagactgcgagtgctaagatccgtagtcgaaagggaaacagcccagaccaccagctaaggtcccaaaatatatgttaagtggaaaaggatgtggggttgcacagacaactaggatgttagcttagaagcagctattcattcaaagagtgcgtaatagctcactagtcgagtgaccctgcgccgaaaatgtaccggggctaaaacatattaccgaagctgtggatgacacaaaagtgtcatggtaggagagcgttctatgtgtgaagaaggtgtaccgtgaggagcgctggaacgcatagaagtgagaatgccggtatgagtagcgcaagacaggtgagaatcctgtccaccgtaagactaaggtttccaggggaaggctcgtccgccctgggttagtcgggacctaaggagagaccgaaaggtgtatccgatggacaacaggttgatattcctgtactagagtatatagtgatggagggacgcagtaggctaactaaaccagacgattggaagtgtctggtcaaacagtgaggtgtgatatgagtcaaatgcttatatctttaacattgagctgtgacgaggagcgaagtttagtagcgaagttagtgatgtcacactgccaagaaaagcttctagcgatacatatactctacccgtaccgcaaaccgacacaggtagtcgaggcgagtagcctcaggtgagcgagagaactctcgttaaggaactcggcaaaatggccccgtaacttcgggagaaggggcgctgattttagatcagccgcagtgaataggcccaagcaactgtttatcaaaaacacagctctctgctaaatcgtaagatgatgtatagggggtgacgcctgcccggtgctggaaggttaagaggagtgcttagcgtaagcgaaggtatgaattgaagccccagtaaacggcggccgtaactataacggtcctaaggtagcgaaattccttgtcgggtaagttccgacccgcacgaaaggcgtaatgatttgggcactgtctcaacgagagactcggtgaaattttagtacctgtgaagatgcaggttacccgcgacaggacggaaagaccccatggagctttactgcagtttgatattgagtatctgtaccacatgtacaggataggtaggagcctatgataacgggacgccagtttcgtttgaggcgttgttgggatactacccttgtgttatggctactctaacccagataggcaatccctatcggagacagtgtctgacgggcagtttgactggggcggtcgcctcctaaaaggtaacggaggcgcccaaaggttccctcagactggttggaaatcagtcgtagagtgtaaaggtataagggagcttgactgcgagagctacaactcgagcagggacgaaagtcgggcttagtgatccggtggttccgtatggaagggccatcgctcaacggataaaagctaccctggggataacaggcttatctcccccaagagttcacatcgacggggaggtttggcacctcgatgtcggctcgtcgcatcctggggctgtagtcggtcccaagggttgggctgttcgcccattaaagcggcacgcgagctgggttcagaacgtcgtgagacagttcggtccctatccgtcgcgggcgtaggaaatttgagaggatctgctcctagtacgagaggaccagagtggacttaccgctggtgtaccagttgtcttgccaaaggcatcgctgggtagctatgtagggaagggataagcgctgaaagcatctaagtgcgaagcccacctcaagatgagatttcccatgattttatatcagtaagagccctgagagatgatcaggtagataggttaggagtgtaattgtggtgacacatttagcggactaatactaatagctcgaggacttatccaaaaagagatattgacaacgttacggtttcttgttagactatagatattcaattttgagtgaataaggctcaatagttaagtgataattgcctaggagatacacctgttctcatgccgaacacagaagttaagccctagaacgccggaagtagttgggggttgccccctgtgagataaggtagtcgcttagctataatccgccatagctcagttggtagtagcgcatgactgttaatcatgatgtcgtaggttcgagtcctactggcggagtagataaagggagactaactttggttagcctttttttattggaattattatccttaagattggctaacatcttaattgtccgaatttgtcactgataccaagtggttacgattaaaagtggaaaaactatcctatgttctaaataaaatcgtcctaagtaagcttacttaggacgatttgttatctatctaatagtgtaagtagtgtaataggtactatttttggaagaatgtttcatatagtgctttaatagctcttttttcatccttactgtttataacgaacataatggagacttcgcttgaaccttgtgatatcatggtgatattgattttttctcttgataaggcttgtgtcgctgttgcagtgactccaatctgacttttcatattttcacctacaattacgattgtagatagattgtgttggatgtcaacgtaatctacttctagtttacgagttaggtaatttaagatttcttgttctttgattggtgtcaattctttttcacgtaagacaatggatagatcatctatgccagttggcatatgttcaaaactaatatttaaatcctctaaaatttgtagtacttttcggccgaaacctacttctctattcattaagtatttagatacgtttatgctagcaaaacggctatcagaagcgatcccagttactgctatgttactacgagtatgctttaaaactatttttgtaccaggctgttggggattatttgtatttttaataacaagagggattctgccacgataggcaggaagtaaagcttcatcatgtaaaaccgaaaaacccgcataggctaattcacgcatttctttataagtaagctcagggatagcgtgagggttcttaactacacctggatgtgctgcaaatataccatcaacatctgtgaagttctcataaaggtctgcttttatgcctgctgcaattagggatccagtaatgtcagatccccctcttgaaaaggtacaaatttggttatcttctgtgactccaaaaaatccagggataacaagaacctcattgtatagacataagttctcaatcttatcataacttcctggaataattcgtgcattacatggttctttagttacaataattcctgcttcgtttggatgaacatatcttgcaggaatgtcattttgattaaaaaacgttgcaactaactttgcgttgttatcttcaccggctgctaaaaaacaatcatataaaaactgattattttctatgggaagtgaagctagctgctctatagagcgagtaatttcttctgcaatagtgcttcctaaagacaaatcactaataatttcttgataacgattgataatccaagtttggtctttaacaatatctttaccgttaatataattttgataatattgtatcaaagcatctgtcatttttaagtcttcttcgtagcgtttccctggagctgaaacgacaacaaaccgtctagtgtagtctgatttgataatatttagtactttgtataattgttgggaagatgctaaagaacttcctccaaatttgactactttcataggttacctcaagaatgaattttagataaattataacaaaagtcagaaaatttgtcattacctctaaatttaaaagaatgatataatagttacatgtgtaaatataaagcaataatatttgatatggatggtgttctatttgacactgaattattttattataaaaggcgagagcgttttttaaaacaacatggaattacaattgaccatttaccaatgaatttttttattggaggaaatatgaagcaggtttggaaatctgttttaggtgatcaatatgatacctgggatattgataagctccaacaagattatagtcgctataaagaggataatcccttgccatacaaagatttaatttttcaggattgtaaaagagtcattgaaaagcttcatcacaaaggctatcttttgggtctagcttcaagttctactagacatgatatcatgttagcattagaaagttttaatctggatacatattttaaggtaattctgtctggtgaggaattttcagaaagtaaacctaatccagctatttataatagagcagcagaacttttagatattcctaaacagcaaattcttattgtagaagacagtgagaaggggattacagctggtattgcagccggtattgatgtgtgggctattgaagataaatactttggaatgaatcagtcgcaggctaatgtattagtgagcgatctgagtcaattttttgtgaaattagataactattaaaaacgggaagtttaattccgtttttttattttttatcttgccatgaaagctaggtttatgataaaatacaaagcatgataatttgataatcaaattattttttatttttctttcactcttaaagagaggagacattttgaagttcgaaaatataatatatggtattgatggcaacgtggccactattatgcttaatcgaccagatatttcaaatggttttaacatcccaatgtgtcaagaaattattgatgcaataaggcttgtgtctgaaaataaagatgtcatgtttttagtgattgaagcacaaggaccaatcttttcaatcggaggagatttaaaagtgatgaaagctgctgttgagagcgatgatattagctcattaactaaaattgctgagttagttaatcagatatcgtatgatttactacagctagagaaacctgttgttatgtgtgtagatggggctgtagctggtgccgcagctaatattgcattagcagctgattttgttatcgcaagcaagaagagtaaatttatccaggcttttgtgggtgtcggtttagctccagatgcaggaggtttattgttacttagtaaatcaatcggtataactcgtgcagtgcaactagctttaactggagaaagcttatctgctgaaaaagctgaagctttgggaattgtttataaactttgtgaatcagataaaataggtaaaattaaggatcaactattaaagcgtttaagtagacattctataaactcatatcaagccataaaatcattagcttgggaagctgcttttaaagattgggaacaatataaaaagcttgaattacaactgcaagaatcattagcctttaagcaagattttaaagaaggtgttcgggcacacgctgatagaaggcgtcctaattttttaggcaaatagtttgaaaatcaaattatttaagattaaagtcttgcaaataagtttgaactttgatataatttgattatcaaagtttaatgtgaggtggtgatatcttggaatacgatcagattaatagttatttagttgacatttttaatagaatcatgattattgaggaaatgagtttaaagactagccaatttagcgatgtatctttaaaagaaatgcatactattgaaattattgggaaacattctgaggtaactcctagcgatgtcgctcgagaattaatgttaactttgggaactgtaacaaccagccttaataagttagaaaaaaaaggctacattgagcgtaaacggtcaagtattgatcgtcgagttgttcacttgagtcttactaagagaggtaggttattagatcgattgcatagtaaatttcataaatctatggtatctcatattattgaagacctaggtgaagaagacataaaaatgttgacgagcgctttagggaatcttcataaatttttggaggacttagtctagtggtttttgctaaaattagtcaacttgcacattatgcaccttctcaaattattaaaaatgaggatttatcattaatcatggataccagtgatgactggatttcgtcacgtactggtataaaacaacgtcatattagtaaaaatgaaacaacagctgatttggcaaataaggtcgcagaacaacttattgaaaaatccggttattccgctagtcaaattgactttattattgttgcaacgatgacaccagactctatgatgccttctactgctgcaagagtgcaagctcatattggagcgagtaatgcttttgcctttgacttgagtgcagcatgtagtggttttgtttttgccttgtctaccgccgaaaaattgatatcatcaggtagctatcaaaaaggtttagtaataggagcagaaactgtttctaaagtattagactggactgatagagggacagcagttttatttggagatggagctggaggtgtcttgctagaagcttctaaggaaaaacattttcttgcagagtctctcaatacagatggtagtcgtcagggacttcaatccagtcaagtcgggttaaattcacctttctcagatgaagtacttgatgataaatttttgaaaatggatggtagagcaatctttgattttgctatcaaagaagtttcaaaaagtatcaatcatcttatagaaacatcttatttggaaaaagaagatattgattatcttttcttacaccaagcgaatcgaaggattttagataagatgtctcgaaaaattgatatagcacgtgataaatttccagagaatatgatggattatggtaatactagtgcagctagtatccctattttactttcagaatcttatgagaacggtttgttgaaactagatggtaaccaaacaatcctcttatcgggtttcggtggaggtttgacatggggaagtctaattgttaaaatttagttatatatagtgcatagcacatttataaaagattatttaaaatttaaggagctaaaaatggcagtatttgaaaaagtacaagaaattattgttgaagaacttggtaaagatgcagaagaagtaacgttgaacactacttttgacgatcttgatgctgattcgcttgatgttttccaagtgatttcagaaattgaagatgcatttgatatccaaattgagacagaagaaggactaaatactgttggtgatttagttgcttatgttgaagaaaaagtaaaataattaagtcgtaagaaaaaaagaagcaagtgataataaaagatattcttaccaaatcacttattagagtgagtattcaatcaatcgttgatcggtactcactcttcttcttatcaatatagtttgattgtcaaattattaattttaggaaagaaaaatgaaaacacgtataacagaattactaaatataaaatatccaatttttcaagggggtatggcgtgggtcgctgatggagatcttgcaggagcagtttctaaggcaggtggtctaggtattattggtggaggaaatgcccctaaagaggttgtcaaagcaaatattgataaaataaaatctatgactgataaaccctttggtgtgaatattatgcttttatcaccttttgtagatgatattgttgatttggttattgaagaaggtgtaaaagttgtaacgacgggtgcaggtaatcctggtaagtacatggagcgctttcatgaagcaggtataacagtaatccctgttgttcctagtgttgcattagcaaaacgtatggagaaattaggggctgatgctatcattacagaaggaatggaagcgggtggtcacatcggaaaactgaccacgatgacattagtacgacaggttgttgatgctgttacaattccagtcattgccgcaggtggtatagcagatgggcgtggggctgctgcgggtttcatgttaggagctgatgctgttcaggtaggaactcgttttgttgttgctaaagaatctaatgctcaccctaattacaaagcaaaaatcttaaaagcaaaagatatcgacactgctgtttctgctcaggtagtaggtcatccagttcgtgccttaaaaaataaactagtaacaacctatagccaagcagaaaaagattatttagctggccgtatttcaatcaatgagattgaagaattaggagcgggagctcttcgcaatgcagttgttgatggggatgttattaatggttcagttatggcaggacaaattgcaggattaattaaatcagaagagacttgtcaagagattcttgaagatatttattcaggagcgcgtcaagttattctttctgaggcaagccgctggtcagatttataaatacaaataaggagacactatgaataaagtttcatttctatttgctggtcaaggtgctcaaaagttaggaatggctagagatttatatgaaactttcccgattgttaaagaaacttttgataaggcaagtcatgttttaggatatgatttgagagaattgattgataaagacttagacaaattaaatcagacgaaatatacgcaaccagctattctaacgacttcgactgctatttatcgtttaattcttaaagaaattgaacttagaccagatatggttgcaggactttctttgggagaatacagtgctttagttgcttcaggtgctataagatttgaagatgctgtagtacttgttgctagacgaggccaactaatggaagcagcagcacctgctggtagtggcaaaatggtagcagttttaaatgctgatcgtcaaataattgaagatgcttgtaagaaggcttctcagtttggtattgttagtcctgcaaattataatactccaaagcaaattgttatagggggagagtcaatcgctgtaaatgcagctgtagaagaattaaaacaacaaggagtaaaacgtttaattcctctgaatgtttcaggtccttttcacactgctttattgaaacctgcaagtcagaaattgagcgatgttttagataaagttcatttttcagtttctgaaatccctgtaattggaaatacagaggcgcagataatgaaaaaagacgatatcaaatctttattggcacgccaagttatggaacctgtacgctttgatgagtctattgaaaccatgaaaaaaatgggaatgacacaggttgttgaaattggtccagggaaggtactctcaggtttcttgaaaaaaatagatagctcattatcagtacattctgttgaagataaaattggatttaataatcttaaggaattaaactaggggaaaatatgcaattaaaagataagaacatttttattacgggttcaagtagaggaatcggccttgcaattgcccatcaatttgcacaattaggtgctaatattgttttaaatggacgttctgaaatatcagaagacttaatagctgaatttgctgattatggtgtaaaagttattgctatttcaggagatgtttcttcttttgaagatgctaatcgcatgattaaagaagctattgcaagtctaggtagcgtggatgtgctcgttaacaacgctggtattactaatgataaattgatgcttaaaatgactgttgaagattttgagagcgttcttaaaattaatttaacaggtgcatttaatatgacacaatcagtcttgaaaccgatgacaaaagcgcgtcaaggtgctattattaatatctctagcgtcgttggattaactggaaatgtagggcaagctaattacgcagcctctaaagcaggtttaattggctttacaaaatcagttgccagagaagtagcagcacgaggcattcgtgtcaatgccattgctccaggctttatcgaatctgatatgacagatgttatcccagaaaaaatgcaagaagctattttagctcaaattccaatgaaacgtattggaaaaggtaaagaagtagcgcaggtagcgtctttcttagcagaacaagaataccttacaggacaagttattgccattgatggcggtatgacgatgcaatgataaagaggaaataatatgacattacagcgagtagtagtaacaggttacggtgtaacctcacctattggaaacacaccagaagaattttggaatagtcttaaagaaggaaatgttggtattggacctatcactaaatttgattcaagtgatttcatggtcaaaaatgctgctgaaattcatgattttccatttgataaatattttgtcaaaaaagatctgaacagatttgatatgtattccctttatgccttatatgcttcaagtgaagctattcaacatgctaatttaaatttagatgaaattgatgcagatcgatttggtgtcatcgttgcatcaggtattggagggattcaagagattgaagaacaagtgattcgtcttcatgaaaaagggccaaaacgcgtaaaaccaatgacgcttccaaaagctctaccaaatatggcagctggaaatgttgcgatgaggttaggcgctcatggtgtatgtaaatcaattaatacagcttgtgcttcttctaatgatgctattggagatgctttccgtaatataaaatttggtattcaagatattatggtagtcggtggtgcagaagctgctattacaaaatttgccattgctggattccaaagtcttacagcattatcaacaactgaagatccatcaagagcatctattccatttgataaagatcgcaatggatttatcatgggagaaggttctggaatgttggtcttagaaagtttagaacacgctgaaaaacgaggagctactattcttgcagaagttgttggttatggtaacacttgtgacgcatatcatatgacttcaccacatccagaaggtttaggagccactaaagctattcaacttgcactggttgaagctaatattaaacctgaagaagttaactatgtaaatgctcatggaacttcaacacctgctaacgaaaaaggagagagtcaagctattgttgctgcacttgggacagacgttccagtttcttcgactaaatcttttactggtcatcttttgggtgccgcgggagctgttgaggcaattgcaactattgaagcgatacgtcatagttatgttccaatgactgctggaacgacagaattatcagaagatattacagcgaatgttatttttggtcaagggcaagacgctgatattcgttatgccatttcaaatacatttggttttggaggacacaatgcagttctggccttcaaacgctgggaggattaaattggatattcaagagattaaggatttaatgactcaatttgatgagtcaagtctgagagaattttcattcaaaacaagtgacggtgagctgtcttttagtaaaaatgagggaaaagctccacttgtcccaactatgtctcctatgagtcatcaacctgaagcgactccaactatagcaactcctgtctctaatgaagcaggtgagcaaacgaaacaagctactgaagtagtttcagaaatcccagagtcgactgtgactgttgcagaaggtgacgttgtcgaaagtcctttagttggggttgcttatttagcttctggaccagataaacctaactttgtttcagtaggtgatagcgtgaagaagggacaaactttgatgattattgaggcaatgaaggtgatgaatgaagtgcctgccccccatgatggtgtagttactgaaattcttgtagccaatgaagaagttattgaatttggtaaaggattggtacgaatcaaatgattgatataaaagaaattcgtgaggctttacctcaccgctatccaatgttattagtggatcgtgttttagaggtatcagaagatgagatagtcgctatcaaaaatgttagtatcaatgagccttttttcaatggtcattttccagaatatcctgtaatgccaggcgttttaattatggaagctttggctcaaactgcaggtgttttagaattatctaaagaagaaaacaaaggaaagcttgttttttatgcaggtatggataaagtgaaatttaaaaagcaagttgttccaggagatcaattagttatgactgctaagtttgtcaaacgtagaggaactatagccgttgttgaagcaatagcagaagttgatgggaaattagctgccagtggaacgttaacatttgcaataggcaattgaagatagtattgaatttagagggagagaagcatcaaaaatgtttaagaaaatattgattgctaatcgcggagaaattgcagtacgtatcattcgtgcagcccgtgaaatgggaatttcgacagttgctatctattcggaggctgacaaggaatcattgcacacaattttagcagatgaagctatttgtgttggaccagccaaatcagcagaatcttatttaaacgttaatgctatattatctgctgctattgtgactggagcggaagctgttcatccaggttttgggtttttgagtgaaaattctaaatttgctactatgtgtgaagagatgaacttaaaattcattggtccatctggagaagttatggataaaatgggtgataaaatcaatgctcgtacagagatgataaaagctgatgttccggttatcccaggatcagatggtcaagttacaagtgtagaagaagctgtatcaattgctgaggaaatcggctatccattgatgttaaaagcctcagccggtggcggtggaaaaggaattaggaaggtcaaatcagcagatgaattgaagcctgcttttgagtctgcttcacaggaggctttggctgcgttcggtaatggtgctatgtatattgaaaaagttatatacccagctagacatattgaagtacaaatacttggagatagctttggtaagatagttcacctaggagaacgtgattgttctctgcagcgtaacaatcagaaggtattggaagaaagtccgtctgtggcaataggtaacactctgcgtcaacaaattggtgaagcagctgttcgtgcagctgaggctgtatcttatgaaaatgcaggaacaattgagtttttgttagatgagaatagcggacagttctatttcatggaaatgaatactcgtgttcaagtagaacaccctgttacagaatttgtaacgggtgttgacatcgttaaagagcagattcgtatcgctgctggaattcctttatcagtttctcaaaatgatattaagttaactggtcatgcgattgaatgtcgtattaacgcagagaatccacaatttaattttgcgccatgtccaggtaccattaatgggttacatctacctgctggcggtatgggcttacgtgtcgattcagcggtttacacaggctacactattcctccttattacgatagtatgattgcgaaagtaattgttcacggagaaaatcgttttgatgcacttatgaaaatgcaacgtgccttatatgagcttgaaattgatggtattgtaacaaatacagaatttcaaatggatctcatttctgataaaaaagtcttggctggggattatgatacttcattcctgatggaagactttttaccaaggtattatggtaacaatcaataggagggaagatggctttatttagtaaaaaggataaatatatccgtattagtccaaacaaagcattagggtcttctgataaacgtagtcttcctgaggttcctgatgaactctttgctaagtgtccttcttgtaaacatatgatttatcagaaagatttaggattagcaaagatttgtccagcttgttcttacaactttagaatttcagcgcaagaacgtctgttgctaacagttgacgaagatagttttgaggaattatttacaggaattgaaactaaggatcctttgaattttccaaactaccgtgaaaaactggctgctacacgtcaaaagactaacttagatgaagcggtggtgacaggtttagctaaaataaaaggacaaactacggccttagctattatggattctcattttataatggcgtctatgggaacggtcgtaggcgaaaagttgacaagattatttgagctagcaactgaaaagaaattacctattgttatttttacagcgtcagggggcgccagaatgcaagaaggtattatgagtttgatgcaaatggcaaaagtatcggcagcagttaaacgccattctaaccagggattgttttatttaacaattttaacagacccaacaaccggcggcgttactgcgagttttgctatggaaggtgatattattctggctgagccacaagcgttggttggttttgctggtcgtcgtgttatcgaaacaacagtgagagaagatttacctgaaggctttcaaaaggcagagtttttgttagaacatggttttgtcgatgctattataaatcgaacagaattacgcgactgcattgctcaactaattgctttccatggaaatgaggttggtcatgaataatgatgtgacaagaattttaaaagatgcgcgtgatcaagggaggctaactgctcttgactacgctgaattgatttttgataattttatggaacttcatggtgatcgccagttcgcagatgacaaatcaattataggaggtttggggtacttggcagggcgtcctgtgacgattgtcggtattcaaaaaggtaagaaccttcaagataatttagaccgtcattttggtcaaccacatcctgaaggttatcgtaaggctttacgtttaatgaaacaagctgagaagtttggaagacctgttataaccttcatcaatactgctggagcatatcctggggtaggtgctgaggagcgaggtcagggtgaagcaattgctagaaacctcttagaaatgagtgatttaaaagtccctattatagctattattattggtgaagggggttctggaggagcattagctttagctgttgccgataaggtttggatgttggaacatactgtttattctattttaagtcctgagggctttgcctctattttatggaaagatggtacaagaacaacagaagcagcacaattaatgaagatgactgctggagaactttaccatatggaagttgtagacaaagtaatccctgaacatggttatttttcaagtgagattgtcgatatgattaagacaagtttaatttcagagttagaagtgctctcacaattatctcttgaggatttattggaacaacgttaccaacgttttagaaaatattaatagaaaaaggctgagttatttactcagcctatatttagtttttcaaggtattatcatagttatagtttcatattttgttataattgataaaaaggagatatatcaatgacactagcattagccaatttttagattgtagtctaatccaaaattttcagaaagagtcatttcgaacactttattctaagtaccattatttaggctctccttaacttgagactctatctgttattgaagagaaattttctagaaaaaatagctattattagattttagaaggctatgaaaagattggtttttaaagagttccattaagtgatgaagaaagtaaagcttggttagttataattgcgattagaccttgtttctagcaacgaggcttcgctagaaatactttaaaagaacttgaaagtatgtatagatatatataatcgtgaaaacttaactattgtttacatggagaaaaagaatgtatcaagaattaaatgattatttagaattccaatcaatgaagtatattatgcctgagaaggcaggcgctttaaaggacgatatgcaaacttttaaggcaaagggccaacttgctaggaatagctttacagagttatcaagagccttagaacaacgtatggatggctttaaaatgcaaagagtgagtaattgggctaatcaagctcaagtagggcgtccacatttttgggtttattatcgaaaggatacagaccaattagatgatgtggctgttgcgctaagggtttatggtgtaaaagatagttttggggttagccttgaggtaagctttgtagagaggcaaaaatctgataagacactcgagaagcaggctagagtgttatcgattccgattgcctctccattgtattttatggtccaaaggcaaggtgaaactcatcgagaagaaggcaatgaggaaaatcgtcaacgtttaatgcaagaaattaagtcagggaaggtaaggaaagtattggtaaaatatgacgttcttttgactgaaaaccagagcttagaaaatattctgcaacgattgttagaaggctttgagaaagtgttaccttactatcaagtttgtcaaactattagctaagttcatagaaaaaatgagttggtataccaactcattttagagtgcctaatttggtttaataatatcgatattacccatatatggacgaagaacttctgggatagtcacagaaccatcttcattttgataattttcgaggattgctgctacagtacgtccaactgcaagtcctgaaccatttaaagtatgaagcaacctaactttgccatcaacttcgtcacggtaacgaatttgagcacgacgtgcttggaaatcttcagtattagaacatgaagaaatttctcgataagtattttgagcgggaatccatacctctaagtcatacgttttagctgctgagaatcccatatctcctgtacacaaggtaatgacacggtatgggagattaagtttttgaagaatattttcagcatttgctgtcattttttctaattcttggtatgattcctcaggcttggcaaatttcaccatttctactttatggaattgatgaaggcgaattaatccacgtgtgtcacgtcctgcagagcctgcttctgaacggaatgatggactcatggcagtaaagtatataggtaattctttcccatcgataatttcatcacgataatagtttgttaaaggaacttcagctgttgggataagtacgaatgggctatctgctaattcgaaagtatcttccttgaactttggatattgtcccgtaccgaacattgaatcgtggttaaccatataaggagggatcacttcagtgtacccctccttagcgtgttcatccagcatgaagctgtagatagcacgctctaaacgagcacctagacctttgtagaagaggaagcgagagccagtaacttttgcaccacgttcccaatcgagaattccaaggctttcacctaaatcccagtgagctttggtctcaaaatcaaattcacgaggagttccccagcgacgaacttcaacattttcatcctcgtctgctccaagcggcacatcatcagctggtgtattaggaagtacggtcaccattgattgtaaattagcatccacatctgccaattccgcatcaattgctttgatatcagcggaaagtgtttgcatagctgcgatttgctcgtctgcattctctttatttcgttttgcttgagcaatggcagcagaagcaacattacgttgcgctttcgcctcttcagctttgataagtagttcacggcgttttatatcaagttctttaagggttgttaatgtttcttggtcaacaccacgcgtggccaattttttagcgacaacatcaaaatctgtacgaatacgttttaagtctaacatataggaatctcctttatactaaaaaacaccctgtcatgctggagcgcaaaggcgcggttccatccagcttcacagaagtgcacttgattgattgattaaattatttcccataaatggaacacggtagaatttcataaaacaatcttatctgctcgcaacgaccgcagactctctgaaaagaactattatactacttatccgttaaggttattatatccaaaaataagtaaaatgtaaaccttaactttataagcctgctctttgttttagtgaaatagctatgctaaaatatgattatggaaaagtatacaagtattaaacaatcaggtcgtcattacggcttagaccttttaaggattatttccatgttcatgattgttattacgcatgttcttggaaaaggtggtctgagatcttcggttgagggacacgcagactcctattttatagtaacgtggattatccaagtcttagtttatggggccgttaactgttacgcactaataagtggttatgtgggaattaattcgcgttatcgttactcaaaattactgtctatctgggcacaggtttttttctacacctttacaataacagcactttttgcaatcacaggtcatgaagtgaccttgcttaattggagagatgcttttttccctattgtcagtgggcagtattggtacattactgcttactttggtctattggtttttatgcctgttattaataatggattaaatgccttgactgataaacaattaaaacaattggttttgttaatgtttattattttttcaattttaccagctgttttaaataatcgtgttccagaattttcattgagcaagggttttgaaatgacttggctactgattttatatattattggtgcctatttgaaacgtattgatttaaatatatttaaaacgtcatatttacttataatttatctattatcattggttgctacttatgccatgaagtttagcgttggtgatatttggtattggtatgtttcgcctactttaactttaggggcggtaagtttgtttatattatttgctagagcaagcattaagccctcgggattcttaaagaaaataattgttgtattagccccttcaaccttgggagtttatctctgtcatctccacccactaatagtaaaatattttgtaagagattttgcagagacgtttgtttatgagtccatttatctttacccatttttaattttaggagcagggattttaatttatttgttggcttttattgtagaacgtattagattacgaatatttaaagcaatccatttttctaactttttgagatggtttgatgacaagttcccatattaatattagagttaaaaaataagatagactatagtctatcttattttttaaacttgaatatttttaaaatggtctggatgagggtaggaagcttaacaactttatcgtctccaatatgtcgtctcgcatgctttaatatcgttccagagtctttagaggcgaataaaaattttccttggtctgtaaagacctcaaagtgacgactaattttttttcgactaacattagctccaatttgattgattgatgtccatggaatttgaatatagtcgttgacatttttatcgttatagaattctaatgcctggtcaccaactaaaaattttccaactttattccccatacctaaatacgaaactcctgttgtttgaaattcaacagttttgtttaatgattgtgccatgactaatccctttttaatttatagtagtttgattatatcataatagtgggactctaagtggattttatgtaataaaatataagagatggaatactattgtaaccatctcttagttttattacatcacacctgcaaggcgagctagaataccaacgataaacaaaccgatgataattgtaattggtgatactttcttcttaagtaaccacatacagaagaatgtaagaagtaatccagctaaaccaggaataagtgagtcaagttgtccttgaagtgtttgtggttgcattttatcaaggcttaagccactctgaacttgtcctaggatatcatgcaattgttgtccactaacatggtctttagggaaattgatgtatgccccttctgacaatgtctttttaggaaggtctacagtaaagttaattgctacccaacgcttaacaaggacagcaaggatgaacataccaaggattgaagcacctttagtaatatcttggaggataccaccagacatatctttagtaatttctttacctgatttgtaacctaactcttgtgtgtaccataagaatgacatacgaatgaggttccaaccaacaaagaagatgattggtccgaggatattaccagcagaggcaagtgaagcaccaagagcacctaagataggacgtacagtaaaccagaatactggatcaccaataccagcaagaggtcccatcataccgattttaaccccttgaattgctttgtcttcgacaggtgtaccgcttgctttttcttcctcaagagcaagggttacaccgataattggagcagcaacgtatggatgtgtgttaaagaattccatatggcgctcaagcgcagcagcacgatcttctttagtagtgtaaagttttttcaatgctgggataagagcataggcccaccccatattttgcatacgctcatagttccaagaaccttgaaggaattgtgaacgccaccaaactttttgacgatctgattttgataatttaatttgttcagtcattgtttagctcctttctagtagtcctctaagatatcgccgataggatcgttagaacctgcgttagaagtacctttgcttccacccatttttgataaactgatgtagatgagggcgatagcaacaccaatagtacccattgcaataagagttaactggttcaaagctgctagagcaaatccaagagcaaagaaaggccaaacttcgcgagtagccatcatattgataaccatagcgtaaccaacggcaacaaccatggcaccaccaacttgcataccaccatttaaccaatcaggcattgcttcaagaatactttgtactgaagaagatggaatagctaaaagaagcgcagctgggaatgcaatacgtaatccttggagaaggagggcgataaagtgaaaacgttcaattgctgcgaagtttccttcagaagcagctttgtcaccagcgtgaacaagtgcagttgagattgtacgaacaatcattgtaaggaaaagtccagcaatagctagaggtacagcagtagagaaggcaaagttgatacctttttgagtgaagtcaccacttttaaccaaaataatagcagcagcaacagaggcaagtgcagcgtctggtgctacggcagctccgatatttgcccaagcaagagcaatcatttggagactaccaccaagaataatacccgcttcgaggtgaccagttacaagaccgattaaagtacaagcaacaagaggttgatggatttggaattggtcgaggataccttcaagaccagcaaagaaggcaacgataacgaccaaaatcattgagataattgaaatatccgccattttgatatcctttcgttttcagagataataagttattttacgtttgctttgttgattaaatcaaacaaattctttttagcgtcatttggtactttacgtacatcaaatgatacacctaagtcacgtaatttttcaaaggcagcaacatcgtctttatccattgaaagaacgttgtttaccattgttttaccagttgagtgagccattgaaccaacgttcaattcagggatttccacaccaccttcaattgcacggagtgcatcttgtacagtttcaaataagatcaaggcacgtgtgtttccgaaacgtgggtctttagctacttcaattaatttactaattgggacaacgtttgctttgactcctccaggagcagcttgcttaatcaattgtttacgaagttcatctttagaaacttcatcagaagcaacgataatacggtttgcttttgatgctggagtccatgcagttgcaacttgaccatgtaaaagacgtgtgtcaatacgagcaagattaattttaagcttgccatctccaataacagttccttcagggatagatccactttgtttaacttccgcaggaacatctgcaggaacacctgctacaggagtagcttctacaacaggattaagttcttctggaagggctttgataccttccttagactctttaataatatttgcggcaacttgttcaacacctgcattagcgtccatcatacgctcagtataggcttggataagcattggcaaattgagaccagtgatgatagccattttacgttcaggattttctcccataacacggcttgcttggttaaatggtgacccactccaaaggtcagctaacacaagcacctcatcatcagcatcaaattgtgcgatagcattgttgaagtgtccatacaaatcatctggtccttcatttggcatgaaagttacaacttgaactttttcttgttcaccaaagatcattgaacctgattgatgaataccttcagcaaatttaccatggctggcaataataataccgatacccattcttgttcttcctccttaaaaaattttttcgttgacataaagaagaataatctccttccaatcgtaaaattggccattctttttcatttcaacgaaattatagaacagatatattttaaaacgttttcagaaaaaaatcaatactatttctaataaaaattaaaaaaaaagatatttttttcacaaataccttttataataggggaagagagtggtaactttttttgttaataatatagtagaaaacctaaaaaacgatttctattagaattctgtttcaatagagatcatttttgaaaatactacaataataatttttctagagttttagcaacaccatcttcttcgtttgtccattggatttgttggtcggcatatggaagtagagttggattagcatttttcatagcatatcctgtatgtgcaaaggccagcatctcggtgtcattgtgttcatctccaaaggcaatcaaattttcttgtgaaagattgagtgattttaataaatgtttgagagcataagctttgttaacacctttaggtgaaaattcgagtatattcaatggaccaccccaagaatctacttctagttcgtgattaaaatgttgtcgtaactctttagctaactcatacttatctttatgacgtgtttgcatcaatagagcatttggattgcgtgtgattttagtaacatctaatgccattttatcagtaatttcattgacaccgaataattgtgggttaattttatcacgattatccatagtaatgtaaaaatttttacggtattcgctagcaataaaatcggcttggatagcatctgataaatttaaggtttcaaggagtaattttttatcaatcgttgcactacgctcaaacgcccactttttttcggggatatgagttaaagcaccattaaaatttatcattggtgtttttaaatctaggcgtaaataatgagcgagtgccatacggtatgggcgtccggttgtaataattactttgtgtccttgagcttgaacttttcgaagtgtatcagcggtgtagtcagaaatagtgttattattatgtaatagagtaccgtctaaatctacggcgataattttctttgtcatgctgacattatatcaaaaatagatttcaataaaaagagacagtagaaatatgatataataactgtggaaatatggaagttggtggattatgaaaaagttaatttggagtcatctttttgccatagtcagtattttagggatatggtattatcatgtaaaaattgatcatttgatggtaattctattggcatcagtcttgtcgttagagatgggattcattgcttattatagtcgtaatatttttattcgtcttttagcaagtttaggtcttttatttttttacccacagagtttagggatttttcttagtttggtgagcttagagtggtcaacaaaagacatttggcagtctaatcactttatgcaatatatggcataccttcttgcaattctttttattatctcttcagctttactaagcttgaagctattggtaaatgcatatgatattagtaaaaggtatcaattagcaactgttatacctgtaatgctttttagtagttttgccttttgcttagaaaaatcaggatcattaggtttagaaggaatcattttaaatccgtcagcattttttaatggaatacagactaatatggctaaccttgattttaaagccttgtcttgcctttttttagtacaattattactttggggaatattaatggaagactaaccacaacagggttagtcttttaggtttgaagtttatttaaccttaatttaataatatgttgtataatgagatattaattggaggttagaatgaaagtaaaactatttgcgatacatctattttttattgttatttcttttgggattaaatattatcatttgcagggaccaaatttgatttggaatatgactctagccctaatagcgttagattttgcataccttactagtttatttaagaaaaaaattcttatcggtctttttgcacttgcttggttttttttctatcctaataccttttatatgttgacggatatcattcatatgcattttgtcggagacgttctttataataagacaaatttaatactttatatcttgtatgtatctagtatcttgtttggttttttatcaggtatcgaaagtttttctgtgattatgcgtaaatttagaattagcaatatatttttaagatggggaattattggaattgtatcattagtttcaagttttggtattcatattggtcgttatgcccgtctaaattcatgggatatcttaacgaagccacaagtggtaattaacgaacttttagcggttccgagtagggattcattccactttattttaggatttacatttttacaggtattgtgtcttatttttatggattattctgcagggaaaaagcttgaaaagtgaattattttttgttaatatatattagtcgttcgtaaatataagaacgattattttttttaaaagtgtaaaatagcaaaaaataaaggagaatccgattttaaaatggaaaagttttttaagctaaaggaacacgggacgacaattcggactgaaatcactgctggtctaacgactttctttgcaatgtcgtacattttgtttgtaaatccagctattttatctcagactgggatgccagcacaaggagttttcttagcgacgattattggtgccgttgtagctacatctgttatggctttctatgctaaccttccctatgcacaagctcctgggatgggattaaatgctttctttacatatacagttgtctttgcattgggatatacatggcaagaagccttagctatggtatttatttgtggtttgatttctctgattattactttaacgaaagttagaaagatgattattgagtctatcccaacaactttaaaatcagccattacagcaggaatcggaacttttttagcatacgttgggattaaaaatgctggttttttgaaattttcaattgatcctgggacgtatgatgttgttggaaagggtgctgcgaaaggattggctactattacagcaaattcttcagcaacgccagggctagtgtcgtttgataatccagccattttattatctttgattggtttaagcattaccatcttctttattgtaaagggtatccgtggagggattattctatcgatattaacaacgaccctcttaggtattttaatgggagtggttaagttagatgctattaattgggaagcaactaacctctcggcctcttttagagatttgaagcaagtatttggagttgcattaggagagaaaggattaatttctttattttctaatccttcacgtctaccaagtgtattaatggccattcttgctttttcactgactgatatttttgataccattggaacgctcattggtaccggagaaaaagttggtatcttagcaacgactggtgataatcatgaatctaagagtttagacaaagcactctattcagacttaattgggacaacttttggtgctatttgtggaacatctaacgttacaacctatgttgagtcagcagcaggaatcggagctggtggtcgtacaggattgacagccttagtagttgctggtttgtttgctatatctagtttttttagtccactagtatctatcgttccgagtcaagctactgcaccaatattggttattgttggtattatgatgctttcaaatttaaaagatatcaaatgggatgatatgtcagaagctatcccagctttctttacttctctttttatggggtttacttatagcattacttatggtattgcagctggtttcttgacctatacactagctaaagtcatcaaaggacaagcaaaagatattcatgtggtactgtggattttagatatattatttattctaaactttatcagcttggctattttgtaatattatagtttgataaataagataaaaggaaatcagatttgtagcctggtttccttttttcttaagaaaagtgaagaaatatatgctatggggctgtcagaatcagcaaactgttggaagacagagatatttctggtataatatctctatgttttatactcaaaatgaagaagagcttattgccctagggcaaaaactgggtactgttttaaagtcaggagatatcgtattattgactggtaatttaggtgcaggcaaaacaactcttacaaaaggtattgcaaagggattagacataaaacaaatgattaagagcccaacttacactattgttagagaatatgaagggcgtgtaccactttaccatttggatgtttatcgtattggagatgatcctgattctattgacttagatgacttcttgtttggtcaaggagtaacagttattgaatggggagagttgcttagtgataaccttatcaataactacttagaaattgttattacgaggagcaatcaaggacgtcaggttcagttagaagcttatgggcatcgcgcaagagaaattattgaggcgattcaagatgtctaaacaatttgctgttgattttatagaagcttcgagagaggaagcatctgcgatccttgaatttttaaatactgttactgaggaaacagattttattttgcatacggtgagcaatcaactatctttgtcagaaatggaaacgtttattgaaaataccttaatgacgaaaaattgcatttgtttgattgctaaattaaaaaataaagtgatcggcttgataacaatcattagtcagtctgatattgaaattgaacacgttggggatctttttattgccgttcagaaggattattggggatatggtattggtcatattctcatggaagaagcaatagaatgggcgtcagataacgatattacacgccgcttagaactatcagtccaaggacgtaatgaacgtgctattcacctctaccaaaaattcggttttgaaatagatgggcttcaaacaagaggtattaaaagagaaaatggagaatttctagacatttacagaatgagtaagttgatagattaggaatatacatgaaaatttggaaaaaaataaccttaatgttttctgcaattattttaacaacagtaattgcattgggagtctatgttgcctcagcttataatttttcgactaatgaattgtctaagacttttaaagattttaagctagctaaatcaaaaagtcatgctattgaagaaacaaagccgttttcaatactattaatgggggtggacacaggttcagagcatcgaaaatctaagtggtcaggaaatagcgattctatgatcttagtcactataaatcctaaaactaataaaacaacgatgacaagcttagaacgtgacgtattgattaaattgagtggtcccaaaaataatggacagactggagtagaagcaaagctaaatgcagcctatgcttctggtggtgcggaaatggcattgatgactgttcaagacttattagatattaatgttgattactttatgcaaattaatatgcaaggattagttgatttagtcaatgctgttggtggtataacagtaactaataaatttgactttccaatatcaattgctgccaatgaaccagagtacaaggctgttgttgaaccagggacacataaaataaatggagaacaagcacttgtttattctcgtatgcgctatgatgatccagagggagattatgggcgtcaaaaaagacaacgtgaagtaattcaaaaagtccttaaaaaaatattggcgttaaatagtattagttcatacaaaaaaattctttccgcagtaagtaataacatgcaaactaatattgagatatcatcaaaaacgattcctaatttgttagcttataaagattcattggaacatattaaatcttatcagttgaagggtgaagacgctactttatcagatggtggctcttatcaaattttaactaagaaacatctacttgcagttcaaaatagaattaagaaagaactggataaaaagcgtagtaaaactctgaagacaagcgcgattctatatgaagattactatggtactactgctagtaatgattcttctacttattcatcaacacaagagaataattataatacaacaccttattcagaagcaccaccaagttacagtggtaatactacttatagttctgagactaatcaaacaactcatcaaaattactataatagtagcactcctgctagtaactatagcagtaacactaacacaggtcaggctgattcaagtggaagtgtcaataatcataacggggctgcaacgcctaatccaaacacaggaacgcaaccagtaccaggtcaaactaatccataaaatataaaaaagagcattatttgctctttttatatttagagtagatatttttataccgtcggcttattcgtctttctcttgatatttagccatgcgttgattaatttcttctaaacgaggttgaatatctttattaaacacttggaatttatgattgagttcttgagaaattaatctgattttttctttttcctgactaataatagcaagatcatttttgatacgttctaattttaatttagctgaatctgtctcattttttgtattttgataggaatccttgatagtttttctatttttgtaaagttcaagcgctcctaaactaactaaacctagtgcaattaaacgacctattttcataattgaatctcttttctaatttctttggctaattttgcaagtgcctcaaagtcgggttcatgagtagtgtagtgaattttgataccgtctgattcatcaaagcggggaacaaggtggacgtgtgcatgaaaaacagtttgtccagcaatttcctcattgttgttaataatattcattcctttggcttttgtagcagcttggacagcacgcgccactttaggcaagcgttcaaaggttatctgtgcagttttttcatccatctctaacacatttcgaacatgttttttaggaataagaagggtgtgcccggtcgtagtttgtgtaatgtcgagaaaagctaatacttcatcatcttcataaacttttgatgaagggatttctccactgatgattttacaaaaaatacaattatccataactaattcctttcatgttgaaaaatttattgggtagctattaaggaatggtaaatttttatcgtttgataggtcataagtcgtacagggaaatgaaagtagcccgtattgattgtgatatctatatttaccatcatacttatcttagcatgacctaaagggtattgcaatttttaatgatgtttattattgagtaagtacatttctagaattttggaagtatctaaaataaatttaaatataatgattgacatttttatctaattaaatgtataataaataatataaataaaataaaaatgataattgagatttatcatagaaggaaaactattttgaaattaaataaaataatattatctactgcagctcttactgctctctttttaggatataatagcgttactgcggatacatataataactatcagccacatagatcaaataatatggatttaactgaggaatataactataataaccagatagaacttcaggagcgtataaaaaaactaaatataccttttaaagaaaaacttgccttacttagaaaggttaaatcaagacaagattcttatgtattagacacattaagaaaagaagttgaaaataaaaacagtgagtattcagaactagagcaagaatatcaaagaatttcagctcttattgatgctaagtttccgcaagggaaatctagtttagcagaaaaattacataaagaactaatttgggacttggatggtgttaaatatgatgagggtatttctaagagaactgctctaaaaaaattagaaggtaaaatcaacgaatatactaaaaaatacagttatttattctgataattgagtttgatagttttatagcctaatattctgattactttgcatttattatattgatactaaaaagacacctttttgaggtgtctttttttgtccgatgagtgatggaggtgctttttgtaaacataatgggagcatggggtagcttggcatttcattagatgtaaaagcggacaaaataggtttaaagttattttcaaaactataagggaattctaaagtacaattatccataagaatagaccttccctttcttattttgttataatagttaataaagtatatcaaagatagagagaatgacaatgttaaaaattgaaaatgttacaggggggtatgttaatatcccagttttaaaaaatatttcttttgaagtaaatgatggagagttagttggattaattgggcttaatggtgcaggaaaatcaaccactattaacgagattattggtattttgagaccctatcaaggagatattacaattgatggtattagtcttgaagccgaccaagaactttatagaaagaaaataggctttattcctgagacaccaagtctctatgaggagctaactctcagggaacatttagaaacggtagctatggcgtatgatattgccaccgatgaagttatggcacgtgcgcaaaaactattagagatgtttcgtctaacagataaattagactggtttccaatgcatttttcaaagggaatgaaacaaaaggttatgattatttgtgcttttgttgtatctccaagtttatttattgttgatgaaccatttttaggtttggatccactagctatttcagatttgattaatcttctagcagaagaaaaagctaaagggaaatctattttgatgtcaacacacgtattagattctgccgaaaaaatgtgtgatcgttttgttattttacataaaggagaaatacgggcagttggaaccctagaggaattacgggctatttttggagacagtaatgctaatttaaatgacatctacatagctctgacaaaagaggtgtgatatgaaaaagttatttaataaacgtcgaagtctctttttaactcaaaatagtaaatatttgagatacgtctttaacgatcattttgtattagtattaatgtttttgtcaggttttttgttatatcagtatagccagttactaaaagactttccaaaaacacattggccaattatcgtgattgtgtcaatcattatcttaatgttactagcgatggggggaatagccagctatttagaaccggctgataaacaatttttacttataaaagaagaagcaataaaggaaattataaattctgctaaaaaacggacttatatcttttggttggttattcaaaccttatttttagtattaatatcaccaattttgataaagttaggcttgtcagtttttatgattacattgttaatttttggtctaggaataatcaaatggttggtaataacttacaaggtaaaggtcttttataacaatcaaaatttgaactgggatgcagctataaatcatgagcaggaaagaaaacagagtatattaaaatttttctctttgtttacaaatgttaaaggaatttcgacaagtgtaaaacgtcgttcatttttagatggtattttaaaacttatttctaaaacgccatcgcgtttatggactaacttatttgtgagggcatttctaagaagctcagattatcttggtttaacaataaggttggtaactttaaatatcttatcagtcatctttgttaacgaaacctacctcgcccttgctctggcatttgtatttaactacttattattgttccaactattagctttaggtcaccattttgattatcaatacatgaatcagctctatccagttagattaaatgctaaagcaagtcagctaaaaggttttctcagagtattatcatatgctgtgacagtaattgatagcatacttataagagaattgaaacctgttatattattgatagttttgatgttaattgtgacggaatattacatcccttacaaaataaagaagatgattgactaaagcctataaaacaagtaaaataagaggaaacgactaaatgaaaaggagggactgctggtgacaatatcaaatcaagaattgacgcttactcccttaagaggaaaaagtggcaaagcctatattggtacttatccaaatggtgaacgtgtctttgtcaaatataatacgacacctattttgccagccttagctaaggaacagattgcgccacaactactgtgggcacgccgtacaagtaatggcgatatgatgagtgctcaagaatggttagatggtcgaacattgactaaagaagatatgggtagtaaacagattattcatattttattgcgcctgcacaagtctcgtcccttagtaaatcagctgttacaattagggtataaaattgaaaacccttatgatttgttgatggattgggaaaaacaaactcctattcaaatccgggaaaacacttatttgcaatctattgtgactgagttaaagcgtagtttacctgagtttcgaacagaggttgcaacaatcgttcacggagatatcaaacatagcaactgggttattacaacaagtggtttaatttatttggttgattgggattctgttcgtttaacagatcgcatgtatgacgttgcatatattttaagtcattatattccacaaaaacactggaaagattggctgtcttactacggttataaagataatgagaaagtctggagcaaaattatctggtatgggcaattttcatatttatcacagataatcaaatgttttgataaacgagatatggagcatgtcaatcaagaaatttatgaattacgaaagtttagagagttaattaaaaagcataatgcgagttagaaaacgtaagggtgcagaggaacacttagaaaataatcctcactatgttatttcaaatccagaagaagccaaagggcgttggcatgagatttttggaaataataaccccattcacatagaagttggttccggaaaaggggcttttatcactggtatggcagagcaaaatccagatatcaattatattggaattgatattcaattgtcagtgctttcctatgctttggataaagttctagatagcggtgctaagaatatcaaattactattagttgatggttctagtctatcaaactactttgatactggcgaagttgatttgatgtatcttaactttagtgatccatggcctaagaaaaagcatgagaaacgtcgattgacctataagactttcttggatacctataaagacatacttcctgagcagggggaaattcattttaaaacagataatagaggtttatttgaatatagccttgctagcttttctcaatacggtatgactttaaaacaagtttggttagatttacatgcaagtgattaccagcaaaatatcatgactgagtacgaacgcaaattttcaaataaaggacaggttatctatcgtgtagaagcacgattttagaataagtaaatagtaagtgggtagttatttgctactcctttatggagaggtcgcatagtggctgagtgcgcacgcttggaaagcgtgtagtccctaatgggggctcgggggttcgaatcccctcctctcctttaatcttgttaatgtatcagtgtttattaagtgttcacctttttcactcgtcaaaagtccaagtttcgaaaaatttcttttattttatcatcgtttctctttgagcttgaagtattagcataaagttttctaagctcttacaaagaactgaggacaaaattttaattttttgatataagattagtgtacggtgatgctaatttaaagtaaatgattgcaataatcgtattttgtgctataatagtattaaataatacagaaaggggcggagttttacttcgcctcttatgtgtgtgattcatagaatttatagtcattataagttctaaagcaagttagaaagaagaggtagctgttatcgcaaatcaaactattgttgatattgttactcaagtcgtaactcctgctattcaagcaccgtttgaattagtagatgtagaatacgaaaaaatgggtggcgactatgtgctcagtattttaattgataaacccggaggcattacggttgaagatacagcacaattgacagacgttgtaagtcccttacttgacacaattcaaccagatccatttccagaacagtatatgcttgaagtctcaagtcctgggttggaaagaccacttaaaacagcagaagcattatcaaatgctgttgggtcttatatcaatgtaagtctgtataaatccattgataaagttaaaatatttgaaggtgacttattatcatttgatggtgaaaccttgacaattgattatatggacaaaacacgtcataaaactgtagatattccctatcagacggttgcaaaagcccgtcttgcggttaaactttaagaaaggatgattcttgcgaagcaagaatggacactatgagcaaagaaatgctagaagccttccgtattttggaagaagaaaaacacattaataaagaagatattattgatgcagttactgagtcactaaaatctgcctataagcgtcgttatggtcaatcagaatcatgcgttattgaatttaacgagaagaaagcagactttaccgtctatactgttcgtgaagttgttgatgaagtttttgatagccgtttggaaattagcctaaaagatgcccttgctattagctcagcgtatgaacttggtgataagattcgctttgaggaatctgttacagaatttggacgcgtggcagctcagtcagcaaaacaaactattatggaaaaaatgcgtcgtcaaatgcgtgaagtaaccttcaatgaatacaaacaacacgaaggtgaaattatgactggtactgttgaacgatttgaccaacgttttatttatgtcaatctcggttcacttgaggcgcaattatcgcatcaagatcagattcctggagagagctttaaatctcatgatatgattgatgtttatgtctataaagtggagaataatcctaaaggagtcaacgtttttgttagccgtagtcatccagagtttatcaaacgcattatggagcgagaaattccagaagtatttgatggaactgttgagattatgagcgtctctcgtgaggctggagatcgtactaaagttgctgtacgcagtcataattcaaacgttgatgcgattggaacaattgttggacgcggtggaagtaacattaaaaaagttatcagtaatttccatcctaaacgcgttgatgctaaaacaggattggagatcccggttgaagaaaacattgatgttattcaatgggttgaagatccagcggaattcatttacaatgctattgcaccagccgaagttgatatggtactttttgatgatgaagatacaaaacgtgctactgtagttgttccagatagcaagttatcgctagctattggtcgccgaggacaaaatgtgcgtttagcagctcatttgactggctatcgtattgatattaaatctgcaagtgaatacgaaaaaatggaagcgcaagaacttcaaactgaggaagtagctcaagaatctgaagttatttcagataaggcagaataatataaatgagagaggtgttttatggctaaaacaaaaaaaatacctttaagaaaatcagttgtttctggtgaagtgatcgataagcgagatcttttacgaattgttaaaaataaagaaggacaggtttttatagatcctaccggaaagcaaaatggtcgaggtgcctacataaaattggacaatgatgaagctatcctagcgaaaaagaaacgagtgtttgatcgcagtttttcgatggaagtttctgatgaattctatgatgaactattggcatatgtcgaccataaggtcaaaagaagagagttaggccttgaataattcagaaaaagtattaaatctcattgggttagcacagcgtgcggggcgccttattacaggtgaagaattggttattaaagcaattcaaaatcaacaagtatcgctaatctttctagcaaatgatgctggcccaaatttgacgaaaaaagtaactgataaaagtaattactacaaaacagaagtctccacagtgttttcaacactggaattaagtgatgcgttaggcaaaccaagaaaagtggttgctgtcgcagacgctggattttcaaagaaaatgaggactcttatggcataacagaataggaggacatcaattgtcaaagaaaagattacacgaaatcgctaaggaaattggaaaaacgagtaaggaagtggttgagcaagctcaatcgcttggcttacctgtaaaaagtcatgcttctagcgttgaagaaaatgatgctacacgtattgttgagagttttagctcttctaaaactaaagctccaacaaattctgttcaaactaatcaaggtgtgaaaacagaatctaaaactgttgaaaccaaacaaggcttgtccgatgataaaccttcaactcaacctgtagctaaaccgaaaccacaaagtcgtaactttaaggcggagcgcgaggctcgtgctaaagctgaagcggagaagcgtcaacataatggggatcaccgtaagaataatcgccataatgatacacgctctgacgacagacgccatcaaggtcaaaagcgttcaaatggtaatcgtaatgataaccgacaaggtcagcaaaataaccgtaataaaaatgatgggcgttatgctgatcataaacagaaaccccaaacgcgtcctcagcaacctgcaggcaatcgcattgactttaaagctcgagcagcagctttgaaagctgagcaaaatgctgaatactcacgtcatagtgagcagcgtttccgtgaagagcaagaagccaaacgtcaagcagctaaggagcaagaactagctaaagcagcagcgttaaaagcgcaagaagaagctcaaaaagctaaggaaaaacttgcttctaaacctgttgctaaggtaaaagaaattgtcaataaagtagccgctacgccatcacagacagcagatagtcgtcgtaaaaaacaaactcgttctgataagtctcgtcaattttcaaatgaaaatgaagatggacaaaagcaaacaagaaataagaaaaactggaataatcaaaaccaagtgagaaatcaaagaaatagtaactggaatcataataagaaaaataaaaaaggtaagactaatggagctccaaaaccagtaacagagcgtaaattccatgaattaccaaaagaatttgaatatactgagggcatgaccgttgcggaaattgcaaaacgtattaaacgcgaaccagcggaaattgttaaaaaactctttatgatgggagttatggcaacgcagaatcaatcattagatggagacactattgagctattgatggttgactacgggattgaagcacatgctaaggttgaagttgatgaagctgatattgaacgcttctttgcagatgaggattaccttaatcctgataacttaacggaacgtccgcctgttgttactatcatgggacacgttgatcatggtaaaacaactcttcttgatactctacgtaattcacgtgtcgctactggcgaagctggtggaattactcaacatattggtgcttatcagattgaagaagctggcaagaaaattactttcttggatacaccagggcatgcggcctttacttctatgcgtgcgcgtggtgcatcagtaactgatattactatccttatcgttgccgctgatgatggtgttatgccgcagacagttgaggcaattaatcactctaaagctgcgggtgtcccaattattgttgctatcaacaaaattgataaacctggtgcaaatccagaacgcgttatcagtgaattagctgagcatggtgtcatctctactgcatggggtggtgagtctgaatttgttgaaatttcagctaagtttggtaaaaatattcaagaattacttgagacagttcttttagttgctgaaatggaagaattaaaagcagatgcagatgttcgtgctattggtactgttattgaagcccgtcttgataaaggtaagggagccgttgcaacgcttcttgtccaacaaggtactttaaatgtacaagatccaatcgttgttggtaatacatttggacgtgttcgtgcgatgactaatgatcttgggcgtcgtgtcaaagttgcgggtccatctacaccagtttctattactggtttgaacgaagctccaatggctggtgatcattttgctgtttatgcagatgagaaagctgcgcgtgctgcaggtgaagaacgtgcaaaacgtgctctcttaaaacaacgccaaaacacgcaacgtgttagcctcgagaacttatttgatacccttaaagctggtgaagttaagtcagttaatgttattatcaaagctgatgtgcaaggttctgtagaagcacttgcagcttctctccttaagattgatgttgaaggagtaaaagttaacgttgttcactcagcagttggtgctattaatgagtctgatgtaacacttgctgaagcatcaaatgctgttattataggatttaacgtacgccctactccacaagctcgtcaacaagcagatgctgatgatgtcgaaattcgtcaacatagcattatctataaagttatcgaagaagttgaagaagcgatgaaaggtaaacttgatcctgaataccaagaaaaaatccttggtgaagccattattcgtgagacctttaaagtttcaaaagtgggaactattggtggatttatggttatcaatggtaaagttactcgtgattcaagtgttcgtgttatccgtgatggtgttgtcatttttgatggtaaattagcaagtcttaaacactataaagatgatgttaaagaagtcggcaatgctcaagaaggtggtctaatgattgagaattataacgatctcaaagaagatgacactattgaagcatacattatggaagaaattaaacgtaaataacccctatgagaaactcaacttgtatctttagttggtagggaaatacaaaattatggctaggctcgtcctagctttcaagttatgagcacaatgaagaaaggattaattatggctaatcatcgtattgatcgcgttggaatggaaattaaacgtgaagtcaatgagattttgcgtctccgagttaatgatccacgtgtacaagatgtcacaattactgatgttcagatgttgggtgacctttcaatggctaaagtattttatactattcattcgacacttgcttctgataatcaaaaagcacaaattggtttagaaaaagcaactggtactattaagcgtgaacttggcaaaaaccttactatgtataaaataccagatttacaatttgttaaagatgaatctattgaatacggaaataagattgatgaaatgttgcgcaatctagataaaaaagattagaatcaagattaagaataataaaaaataaaccatgtcaaaatcatggtttattttttatagctttagagttgagatagctagtattaaggagttttattgatgatatcaatcatttgatactgtgctgttttagcttcttcaatagggtaaattggataaacatgattcattccctcttgtgcaatatagttaacggggtgattagctgcttggagttgtgcagcataatcgcgaatatctgggaagaatatttctcgtgttccagtaaataacgtaataggagcgagtttagtagcaggggcatttttaggactaacatatgtatggttagtattattagaaccatttgcccaaatttcacctacacgtgcgagaccccaagcagataggataggatcagtatcttcgtatttgggaatttctggatgtttcattgtcacatctagccatggagataagaggataatatttttaggttgaggaatagcctcttgccctgattggtgagacaatgcatgcgctaatcctagtgctaatcctccgccagctgaatcacccatcaaagtgagattagcgtttttttcatgaaagtgtctataaaggttaaccaatctagggatagcataatcataggtataacgaggagtttttggataaattggtaaaataatttttgcatcaagactagttgagagcgtcttaagcatgctgatatggtaaggcgttggattatttaagtaagagccaccagctaaatagaaaatggtcttttgattagctttaccgttgtcattccaagaatagacttgcatatcaaaaagtctctcttgaacaagccctccattaacagagtttgggtctaagtaataacccttatcagattgttcacggctagcatttaagtacttttgaaatgagctttcatcttgaactttataataacttttatcgcgctttagccaaaagtattgttcgataaaccaacttttccatgaacgcccacttgcttttgcatgtggtgtacaggcgatggataaaatggtgataatactaaatagtagcaatagttttttgaaggacggtttcaaggtattctccttaatataatgttattttttgtgtaatattattataataaaaccaacatctttgtcaatagaataaagaaagatgagaaatgtttttcggtttacaaatgtagatttatttgctaaaattggtttacaaacgtaaatcgaaagaggtgagaaaatgactatttcaagcgcagaatgggaaattatgagagtggtttgggcacagcagaatacaaccagtaatgagatactagcagttttactagagaagtatgattggactccttcaactgtcaaaaccttattaagaaggctcttagataaaggctacgtgagcagagaaaaaatgggaaaaggatttagctattctcctttaattgatgaagatttagctatgatgtcagaggtagatagtgtatttcaaaaagtttgccagaccaaacatgttgctattgttagacacttattggaaagtataccaatgacagagaaggatcgattaaatttgcaatcatcactagaagctaagaaaggcaaaacacttgaacgtgtagcttgtaattgcattcctggtcagtgtcaatgccattagaaaggagaaaatatggctaatagaaaagaaacatttttgattgatgggatgacttgtgcatcttgtgctttaacgatagaaaaagctgtcaacaagttagaccatgtggatagtgcagtagtaaatttagcaacagagaaaatgacagttacgtttgatgatacaaccttatcgccaaatgtgattgaagagtgtgtttctgagagtggatacgaagcatcgcttttcaaagaggaaacttctaaaagccaatctgaacggcaccaattagccattgaaaagatgtggcatcgcttttggatgtcagcagttgcaactatacctcttctctatatttccatgggaccaatgattaacttatggttaccatcatttttgatgccagataagggacctctaaactatggtatgatacaattattgttaacactaccggtgatgtattttgggcgtatcttttaccaaaatggttttaaagcactttttaaaaggcatcccaatatggattcattagttgctatagccacaacagcggctttcatttatagcttatatggattgtacgaaatattacagggtgacatacactacgctcaccagctttatttcgaatctgttgcagttattttaacacttattactctaggaaaatattttgaaatattatccaaagggcgtacttcggcctcgattgaaaaattattaactttatcagcaaaagaagcaagagttatcaaagatggtgaagactatatggttcctttggataaagttaaaataggtgaaacaattcttgtcaaacctggagaaaaaattcctcttgatggccatgttgtagcaggagaatcaagtattgatgaatccatgttaacaggtgaaagtattccagttgaaaaaaaggttggtagtaaggtttacggtgccagcattaatgggcaaggtagcttaacgattttcgttgaaaaagaagctggcggttcccttctatcacaaattattaacttagtagaagctgcacagacaagtaaggctccaattgctaacttagcagacaaagtatcaggagtctttgtcccttttgttattgtcattgcaattttatcaggcttgagttggtacttaattctggggcaaagttttgccttctctctgaagattatgattgcagtcttagtgattgcttgtccatgtgctttagggttggcaactcctacagctattatggtggctagtggtaaagcagctgagaatggtattttatttaaaggtggtgaagtgttggaaaaggctcaccacattgatacaatagtttttgataaaacaggaaccttgaccaaagggaaaccagaagtagttgctatcaaaacatatgggggagataaagaggagtttttaggtcaggtagcatcagtagaaaaactttcaaatcatccacttagccaaacaattgttaataaagcaaaagagaaagaacttcccttaagggaagtcatggcttttaaaaatattttgggttacggtttgagtgcaactattaatggtaaaactatgcttgtaggtaatgctaacttaatgactaagaacgatgttaatttagatttagcaaaggctgatatagaaatagctcaagaagaagcacaaactgtggtttacgtttccgaaaatggagtgttgagcggtttaataactttaacggaccagctaaagacagatagccaagaaacagttaagcagttacaaagattaggatttaatttagttttacttactggtgataataaggctagtgcagatgccatagcacaaaaattgggtatcacgacagttgtttcagaagttttacctgatcagaaagcaaacgttattttagaacttaaagaaaaaggcggacagattgcgatggttggtgatggcatcaatgatgctcctgcgctagctagcagtgatgtaggtatctctatgagttctggaacagatattgctattgaatcagcagatatcgtgttgatgaaacctgagttaacagatctcttaaaagcaatgactatcagtaaacaaacgattcaaattattaaggaaaatttattttgggctttcttttataacgttttagcgattccagtggcaatgggtgttttacatctttttggtggtcccttactcaatcctatgttggcaggcttagctatggcgtttagttcagtttcagtagttttaaacgcacttcgcttaaaagtcttaaaataataaagataataagactgaatttttatgaagggagaagaatatgaaacatacctatcgagttagtggcatgaaatgtgatggttgtgccaaaacagtttctgataagttatcaagtgtgattggtgttgacgaggttaatgttgatttgactaaaaatcaagttgtcgtaagtggaaaaacattcaaatggcttttaaaacgttctttaaaagacacaaagtattcactagaagaggaaataaattaataactaaagaagtggttacagcttttaatttcttaatttgagcagtttctcacttcttttttattctaaaaatgataaactagaatagaattagttgtgaggagtgcagatgtcaattgatatttggaacattttaagtttggttggaaccgtagcttttgcaagttcgggagctattgtggcgattgaggaagaatttgatattctagggctttttatcttaggttttgtaacggcatttggtggtggagctattagaaatgtactaattggcttgcctattgaaacactttggagtcaaggaattgctttttatgcagcagcagcagctattttatttattatgattttccctaatttgttgagtggtaagggacgggatgccgaagttgtatcagatgctattgggttagcagcgtttagtgttcaaggagcactatatgcgactcaatctcatcaacctcttagtgctgtcattgtcgcagcagtactaactggtgcaggtggtggtattgtcagagatgttctggctggccgaaaacctggagtactaagaagtgaaatatatgcaggttggtcaatattagtggggatcattttatattttaaaattgctaaaacaacaactgactattatttgttagtgttagttgtaactagcctaaggatgttgggttataagaaacaatggcacttgccagttgtcagaccacgtaagaaatgatagaggagaaaaagatgataaaattaattgctattgatatggatggaacgcttttaaatgatgaaaagaaaattccaaaggaaaatatccaagctattaaagaagcaactcaagcaggtattaaaattgtactgtgtactgggcgaccgatgtcaggtatacttccttattttaatgaactaggtttaacaaaagaggagtatattatcatgaataatggttgtagcacttatagcacgaaagattggcaattgattgattctgcaactttaacacatgatgaactcatctttcttgaggaggttgttaaagaatttcccaacgtttgtttaacattaacagctgaaaatacattttacgctgttggagaggaagttcctgaaattgttgcttatgatgctgatttagtttttacaaaagcaaagtcaacaagtttagatgctcttcgcaatcaagaagaaattgtctttcaagcaatgtacatgggattagatgcagatgtaactgcttttcaagaagctgttgaagaagccttaatctcgaaatttagtggagttcgaagccaagactatatttatgagattatgcctcaaggagtaacaaaagcaagaggcttaaaatccttgatagcaaaattaggactggatattaatcaagttatggccatcggtgatgctcctaacgatattgaattattagatttagttcccaatagcgttgctatggggaatgcatcagatgagattaaatctagatgtaaatatataacggtggataataacaaagcaggggttgctaaagctatttatgactatgctttacgttaaaatagatatagaataataaagggaactttaaacactgtttgtttagggttcttttgtttaataaactaacaaaattcagaagtttacagatagcttatgctataatagacctatgacaaacaagaataaattacttttaattgatggctcatctgtagcctttcgtgctttttttgctctttataatcaaattgaccgctttaaaaacaattctggacttcatactaatgccatatatggtttccatttgatgttgaatcatattttaggtcgtgtccagcctagtcatattttagtggcttttgatgccggaaaaactactttccgtacggaaatgtatgcagattataaaggtgggcgtgctaaaactccggatgaatttcgtgaacaatttccttacattcgtcaacaattagatgtcttaggcatcaaacattatgaattggaacattatgaagccgatgatatcattggtactcttgcaaaacaagccgaagctagtaatgaacattttgatataacggtggtttctggggataaagatttaattcaattaacagacactaacacggtagtagaaatctctaaaaagggagttgctgagtttgaagaattcacgccagcttaccttatggaaaaaatgggaattacgccgagtcaatttattgatttaaaagctttgatgggagataaatcagataatattcctggggttactaaaatcggtgaaaaaactggcttgaagttgctatcagaatatggttccttagaagggatctatgaaaatattgaggctatgaaacagtctaagatgaaagaaaaccttatcaatgataaggagcaagctttcttatcaaagaccctagctacaatcaacatagcatcacctataacaatcggcttagaagatatcctttatagtggaccgcaagatataaaagccttgtctcaattttatgatgagatggattttaaacagtttaaagcagctctgggtgaggagacaagtcaggaagattttgaggttgactttactgaagtggagcaattaaaaacagaaatgttctccgataatgatttttattactttgagatgttgggtgataactaccatgtagaagatttaattgggatagcttggggaaatagcgatacaatctacgctactagtaatgtatcgttattgcaagaagctttatttaaaaaagctttatcaaaacctatcaaaacttatgattttaaaagaagtaaggtccttttaaatcgttttaatattgatttaccagagccagcctttgatactagattggccaagtaccttttgtctactactgaggataatctagtatcaacaattgctaggttatatacaaatctgccactggatactgatgatgctgtttatgggaaaggtgctaaacgcgctataccagaaaaaacacgatttcttgagcatctagctaaaaaagtaaaagttttagtggattctgaggctaatattatgcaacagcttaaagctaatgagcaagaagaattgctgtttgaaatggagcaacctttagcgaatgttttagctaaaatggaaattcgaggtattaaggttaagaaaaataccttgaatgaaatggccattgaaaatcaaaaagtcatcgaaacattaacacaagaaatctatgaattggctgggcaagagtttaatattaattctccaaaacagttaggaaagttgttgtttgaaacgttaggtcttcctgtagaaatgactaaaaaaacaaaaacaggttattcaactgcagtagatgtattagagcgcttagctccgatttctcctcttgtaactaaaattttagagtaccgtcaaatcactaaattgcaatcaacctatattattggtttacaagattatattttagaagatggtaaaattcatacacgttatgttcaagatttgactcagacaggtcgtctttcaagttctgacccaaaccttcaaaatataccagttagactagagcaaggacggcttatccgaaaagcttttgttccatcagaagacaatgctgttttattgagttcagattattctcaaatagaattgcgcgtgttagcacatatttcaaaagacgaacatttgatcgctgcctttaaagagggagctgatattcatacttcaacagctatgcgtgtttttggtatcgaaaaacctgagaatgtcactcccaatgatcgtcgaaatgctaaggctgttaattttggaattgtttatggtatttcagattttggtctatcgcataatttaggaatacctcgtaaactagcgaagcaatatattgacacctattttgagcgttatcctggaataaaaaactatatggaaacagttgttcgtgaagcaaaagataagggttacgttgaaacacttttccatcgtcgtcgttcattaccagatattaattctcgtaattttaacattcgccaatttgcagagcgcacagcaatcaattcaccaatccaaggaagtgcagctgatattcttaaaattgcaatgataaatttagatagggtacttgataaaggtggttataaatcaaaaatgctgttgcaagttcatgatgaaattgtacttgaagtccctaacgaggagataggagcaatcagggagttggttacaaaaacaatggagtcagcaattagtttatcggtacctttgattgcagatgagaacgcaggtgagacttggtatgaagcgaagtagtggacaacatacgtaaaggagtcattaatatggtttatcattttcaaaatccaagtgattttatgttaaaaaattatttaacaaaagcaaagaccatcgcagttgtaggactgtcagaccgtcaagaaactgcagcttatcaagtatcaaaaataatgcaagaagcaggttatcaaattattccagttaatcctaaaaatgcaggacagaaaatacttgggcaaatgacatatgcctcacttaaggatgtcactgaacatattgatattgttaatatttttcgacgtagcgagtatttacctgatattgcaagagaatttttagaagtagacgctgatattttctgggctcagcttggacttgaaagtcaagaagcagagacaattctaaagcaagcaggacacaaacagattgtcatgaataaatgtctgaaagttgaatgccaaaaattacactcagaaactaactaattaccgtgtttaataggcaaataatataaattatgctataataaccatgctaaattaaagttcgtgctggaaaggagtcctatggacagtcattcacatggtcatagacctctcgatgcttatgaaaacgtcctagagcatctccgtgaaaaacgtattcgaattactgagactcgaaaagctattatttcctatatggttaatagtcgtgagcatccgagtgcagaaaagatttacaatgatttattaccagaatatcctaacatgagcttggcaacagtttacaataaccttaaggtccttgtggatgaggggtttgtgacagagctaaaactttgcaattatagtacaacttattatgattttatggggcatcagcacctaaacattgcctgtgaagattgtgggaaaatcgttgattttgtcgatgttgacttattggatatttctagagaagcacaccaacaaacaggttttgaagtgactagagttcagttagtagcttatggtatctgtccggagtgtcagaggaagcgtaaggataaatataaaaaagattgaaacgtaattgttcaatctttttttgtttatagactaagagaaaaagtttaagttttactaagtaataattaagaaataatttataattgcttaaaaaatgatttattttttgttggtatactctcattaacaaaaagaaagaggaatcccttatgaaaatatcacaatacaataaatggtcaattcgccgattgaaagttggagctgcatctgtaatgattgctagtggaagcattgttgctttagggcaatctcatattgtttcagcagatgagatgtcccaacctaaaacaaccattacagctccaacagctaacacttctacaaatgtagaaagtagtactgataaggcattatcaaaagttactacgatggagacaagttcagaaatgcctaaaatgcaaaatatggcaaaagttgaaaaaacgagtgacaaacctatgatggtggctacctctgttagaaaaatgatggcaacgccgacacctgtagcgatgaccaaaacgactagtgtagatgaggtaaagaaatcaactgatactgcttttaaacagacagtagacgttccggctcattatgttaatgcagcaaaagggaatggcccatttctagcaggtgtaaatcaaacgattccatatgaagcgtttggtggagatggcatgttaacgcgtttaatccttaaatcttctgaaggagcaaaatggtcagataatggtgttgataaaaatagtccattattaccattgaaaggcttaactaaaggtaaatatttctatcaagtttctttaaatggtaatacgacaggtaaagagggacaagctctcttagatcaaattaaagctaatgataaacatagctaccaagccacaattagagtttatggtgctaaagatggtaaagttgatttaaaaaacatgattagcccaaaaatggtaaccattaacattcctcacattacaactgatatggaagtaaaaaattctctaaagatggcctttaaagaaaaagtagacgtcccagcaaaatatgttagtgctgcaaaagctaaaggtccatttttagcaggtgttaacgaaacgattccatatgaagcgtttggtggggatggcatgttaacgcgtttaatccttaaagcttcagagggagcaaaatggtcagacaatggtgttgataaaaatagtccattattaccgttaaaagatttaactaagggtaaatacttctaccaagtctctcttaatggcaatacagccggtaaaaaaggccaagctctcttagatcaaattaaggcaaatggaagccatacttatcaagcaactatcactatttatggtacgaaagatggcaaagttgatatgaatactattttaggacaaaagacagtgatgattcatattaatgtcgctaaaaaagatatgaatagcacatcaatgatgatgaaaaaagataagatgacaatgcctatgaagaaagaaatgacttcatctaaaataaataccggtatgatgatgtctaacaacaagatgtcagctaatatgcaaatgtcatcacaagccaaatcaaatgataaagctggtaaaaaaatgtctatgatgtctaaaaatttacctaatacaggtgaaacaaagcaacaaaatgtaggtgtgctaggtatgcttagtctagcctttgcgacaggtctaactgcgctaggtcttaaaaaatctaaacaaagatagggatagtatttaattcagaacaccaaatttgtttaaaattattgagggttatcgtggtaaaatagtgttatactagaggtatagcactattttgactcattaggagagtagaatgacacaaaaattattattagttgacgatgaatttgaaattattgatattaatagacgttatctagagcaagcaggatatgaagtgtcagtagctgcggatggcatagaagcactcaaagaggtagatgagaatcgttttgacctaattattagtgatattatgatgcctaaaatggatggctatgattttattagtgaagttctagttcgagaacccaaccaaccttttctctttataaccgctaaagtatctgaaccagataaaatttactctttgagtatgggtgcagatgactttatttccaagcctttcagtcctagggaattagttttacgtgttaaaaatattctaagacgtatctatgggaatcatcaacaatctgaagtgttgacgattggtgatttggttatcgaccaaaaacaacgtttggtaatggtggactgcaatacaatttccttaaccaataaatcatttgacttgctttggatattagcaaatcatttgaatcgtgttttttcaaaaacagagctttatgaacgtgtctggggcgaagaatttttagatgacactaatactttgaatgttcatatccatgccttacgcaatgaccttgctaaatttagtacagacaataccccaactatcaaaacagtttggggattagggtataaattagaggaataaaatgaaattaaaatattatattgttattggttaccttatttctatgttaataactgtagcaggtgttttctttgggcttaatcatatgctgattgagactcgaggtgtttactacatcctttcagttacaattattgcctgtattgtaggtggtatagttaatttgttcttattatcaagtgtatttacatctttgaaaaagttaaaacaaaaaatgaaggatatttctcaaagatgttttgatacaaaagcacaaatttgttcaccacaagaattcaaggatttagagacagcctttaaccaaatgtcttcggagttagagtcaacgtttaaatctctaaacgagagtgaacgcgaaaaaacaatgatgattgcacaactttcacatgatatcaagactccaattacttctatacaatcaacagtagaaggtattttagatggtattatatctgaagaagaagttaactattatctcaataccatttctcgtcaaacaaaccgtcttaaccatctggttgaagaattaagttttattacattagagactatgtcagacacggctgaacctcataaagaagaaacaatttatctggataaactactgattgatattttatctgaatttcaattggtgtttgaaaaagaaaatcgccaagtaatgattgatgttgcgccagatgtttcgaaattatctagtcaatatgataaattatcacgaattttattgaatttgattagcaatgcagtcaaatattctgatcctggaagtcccttgactatcaaggcctattcaaatcgtcaagatatcgttatcgatattattgaccaaggctatgggataaaagatgaagatcttgcttctatttttaatcgtctttatcgtgtagaatcttcacgaaatatgaagacaggaggacatggtctaggtctttatattgcgcgacaacttgcacatcaactgaatggggatattttggtcgaaagtcagtatcaaaaaggcagtaagttctctttagtacttaaattacaaaaatagctaggaattattcctagctattttttgtaatgtttctataaaagattaagcgcgcagtagtttggtaaggaaggagatagatatagactaatccgaaactgaagattgtaaggaactgccaaccaataaaacttaagtctaaaaggaagagtctaagtttattaccattcattagttctcgactagcaaccagtactttagacggtccctcatagtttccactttctaattgagtgtaaaatactaaagttgagatactataggagtaatattgttgaacgagttttataactgccttagtagtaattaggctactaacaactattaaaacaggggcaaggataaggttaccactcaaaagtagcctaaaacttgaaatgatgattagtagaccaaaagtacttagtagataaaagaaagataaaattagtccttttagaacaagtactgagagtaatttccagaaaatatggcttgaaaatacataagtattgtccgagaatctaacgtttagtttctgatttttgacgacatctaacattacaaaactgactgaaataataaaaagtgtgtaaaagaaataaactggaagaggtacaaaaaaatcaagtagtgtcatattattatattgataataaaatgatatatataacgtaataatactaaggagaatcgggagtaaaaaaagttgattcttaccttgaagattgcttaatatagtttttgcctcatttttaatttctgaattcgtcatatctcctccatacacaaaagtacaattcatttcattataacacattccttaagatgagcatgacaagagtacatttttttgataaaatcttaatggctaaaaaagaaattaatacaaagtattacatttagatattgattagcactaaagcccatgactgtttttcatggaagcaaggagaaaacgatgactgatcatccaataaaatatcgattaattaaacaggaaaaacacacaggagccagacttggtgaaataatcacaccacatggtacatttccgacaccaatgtttatgcctgttgggacacaagcaactgttaagacacaatctcctgaagaactaaaagaaatgggttcaggaattattctatcaaatacctaccatttatggttacgtccaggtgatgaattgattgctaaagctggaggtttacataaattcatgaactgggatcaggctattctaacagacagtggaggctttcaggtttattctttggctgatagtcgaaacatcactgaagaaggagtaacctttaaaaaccatttaaatggtgcgaaaatgtttttatcaccagaaaaagctatttcaattcaaaataaccttggttctgatattatgatgagttttgatgagtgtccacaattttaccagccttatgattatgtaaaaaaatcaattgagcgaacaagccgttgggcagaacgtggattaaatgcccaccgccgtcctcatgatcaaggactatttggtattgttcaaggggcagggtttgaggatttacgtcgtcaatcagcacgagatttagtatcgatggattttccaggttattcaattggagggcttgcggtcggagaaacacatgatgagatgaatgcagttcttgattttactgttccaatgcttccgaatgataagcctcgttatttgatgggagttggtgcaccagatagtttaatagacgccgttatccgaggagtagatatgtttgattgcgtcttacctactcgtattgctcgaaatgggacatgtatgacaagtcaaggtcgcttagttgttaagaatgctaaatttgcagaagattttacgcctcttgatccaaattgcgattgctatacttgtaaaaattatacacgcgcttatattcgtcacttattgaaagcagatgaaacttttggtattcgtttgactagttaccataatctttatttccttgtcaatcttatgaaagatgtcagacaagctattatggatgataatcttctagaattccgtcaagattttatggagcgctatggctatggcatgaataaccgtaatttttaaaaaagttcctggtaaaacagggcttttttttgaattgtttgttaaccgtttttttaaaaaagttgacaatagaaaaacttttgtataatatgttataggaggaatcatgatgcaagagtactttggtattggtcttgatagtagcagccgctgttaccactatcatactaaattggatattgtcgctttaaaatgtgctgtttgtcaaaaatattatgcttgttataaatgtcatgatgcactcgaggagcattgttttgcagcaacaaaatctgatgaaacgtttcctgtcttatgcggttcttgtcgtcagatgttgacattaaaagagtataaaactggtttttgtccttattgtcgtatgctttttaatccaaattgtcaacgccatgattctatttatttttcgaaggagtaatttttaatgtttcacacaaaaagcctaatccagatggctatgatggctactttattggtggtacttggtttcattcctgctctaccacttggtttcattccggtccctatcgtcttacaaaacctaggggttatgatggctggtgttattttgggcggaagaaaagggagtttatctattttgctcttctttcttgtcggtttagttattcctgtattctcaggtttacgttcgactatacctgtattgacaggaccaacagctggttatgttattgcttggttgtttgttcctttgcttatctcatatggtgtaaaattagtaaataaaaagaattttatagctattttccttattgtatggctagcaggggtcctttttgtagatgtagcaggagcagtttggctggcatcttatacgaacatcccattagataaatcacttcttcaaaacttagtatttatcccaggagatacaataaaagccattatagctgctgttgttgctgttaaatataaagatagttttttcttgactgaaaaataatcaagattgctatatattagatggactagtaaatctaaaaatttagatttactagtcttttttgtgcataaaatctaaaacagttattcttaataaaatttggtataatagcattaaatcagtaaggaggggattatcatgaaattaacaacgttaggttgttggggtggttatccttataaagatggaggaaccacaagttttctattaactggagaaaataattttcacttattaatagatgcgggaagtcgttcaatcaatgagctagaaaaagaaataagcccgttggatttggatgcagttatcatcagtcattatcatccagatcatgtagcagatttgggtgtgttgtatcattatcgtttgctataccctaaagataaatgggaacccaaagtattgccagtttatggacataatgaggatgattatgagttttctaaattgacattacctaacgttgctcaaggaattgcttatcataccaatggagttgagcaagttggtcccttcaatattacgtttatcaaaacagtccacccagtcgtctgctatgccatgaggattacagaaagagaaactggtcaagtattagtctttacaggagattctgggtattttgctgaccttgtaccttttacaaaaggcgcagatttatttttagcagacgtttatctttacgagggaaatgaaaatcatattgcacatttgactagtaaagaagcaggtgagattgcttataacgctaaagttaagaaattagttttaacacatgttccgcagtttccgggagaaggaataaaccccgaaaatcatttggaagaacttcgactacagtctgaaaagtatgcaggtggcatctctgttgatttagctcagccacataaatcttgggacttaggaaaactataatgcagaaatttacccaagaagaaaaagaatggtttatgacagaagctctaaaggaggcaaaatcctccttagagaaagaagaaattcctataggttgtgtcattgtaaaagatggtcatattattggaagaggacataatgctcgtgaagagtttaataaagctattttacatgctgaaatcatggctattaacaatgcaaatgagaaggtagggaattggcgcttattagatactactttatttgttactgtagaaccttgtgtaatgtgtagtggagctattggcttagctagaattccccacgttatatatggcgctaagaatacgaaatttggagcagcgggaagtctctatgatattttaagtgatagccgacttaatcatagagttgaggttgaaaccggcattttagaagatcaatgcgctaaaataatgcaggatttctttcgaaaaggacgacaacgcaagaaagaagctaaactaagtgaaaaaactaagatttgatagcttgcaataaaatattagttttgttataatatctttggagcaacatttactcgtgaagtgggtcaggggaggaatccagcagccctaagcgatgctaaatgtgtgctctttttattttcaaaagtcaaagtgtttttggaaataattatgaaagtttcataaaaattggtagcgtttcaaaaaatatgaaaatacagttaaaaaaccttgaaaaaaaactcacaaaagagtaagatgatagtgaaacataattgttaggagaaataaaatgacacatattacatttgactattcaaaagtcttgggtcaatttgtaggcgaacacgagttagactacctacaaccacaagtaagtgcagcagatgctttccttcgtcaagggactggtcctggctcagattttctcggatggatggacctcccagaaaactatgacaaagaagaattttctcgcattcaaaaagccgctgaaaagattaaatcagatagcgaagtactcgtggttattggtattggtggttcgtaccttggcgcaaaagcagcaattgactttttgaataatcattttgctaatttgcaaaccgcagaagaacgtaaagcgcctcagattctttatgctggaaattctatttcatctacttaccttgccgatttagttgaatacgtccaagataaagaattctcagtaaatgtcatttcaaaatcaggtacaacaactgaaccagcgattgctttccgtgtatttaaagaacttctagttaaaaagtacggtcaagaagaagctaataaacgtatctacgctacaactgataaagttaaaggtgccgtaaaagttgaagcagatgctaacaattgggaaacatttgtagttcctgataatgttggtggtcgtttctcagtactgacagccgtaggtcttcttccaattgctgcttcaggagcagatattactgctcttatggaaggcgcaaatgctgctcgtaaagatttatcttcagataaaatctctgaaaacattgcttatcagtacgctgcagttcgtaatgttctttatcgcaaaggttatatcacagagattttagctaactacgaaccatcattacaatactttggtgaatggtggaaacaattagcaggtgaatcagaaggtaaagatcaaaaaggtatctatcctacatcagcaaacttctcaactgatcttcactcacttggtcaatttattcaagaaggttaccgtaacctctttgagacagttgttcgcgttgagaaacctcgtaaaaatgtgactattcctgaattaaccgaagatttagatggtcttggttatcttcaaggaaaagatgtagattttgttaataaaaaagcaacagatggtgtactccttgctcatacagatggtggggttccaaatatgtttgtaacgcttcctacacaagacgcttacacccttggttacactatttacttctttgagttagcaattggcctttcaggttatcttaactcagtaaatccatttgatcaaccaggggtagaagcatataaacgtaatatgtttgctcttctaggtaaacctggattcgaagagcttagcgctgaattgaatgcacgtctttaaaaatatctaactaaaaagttcctcaaagagaggaactttttagttttgttgtaggataactaaaaacccactagcaccggtagcgatagtgggttggaaaaagggttgagaaaagttattaacttttctcaggagatttatgaaaaaggaaaataatttaggataatattttcctaacggctaggataaaccgcttattttaggatgatactagtatacagtagaaaccttaaataaaccttaaaaattcatactttatcattttattttcccctatactatttttgtataaatggtcaatattaatggtatcatagatatatggaaaagaaattattaagaaaagaagttttgataaccttaaaatctcaacctcaagcttacaaatcagaagttgactgtaaacttttagaggcttttataaaaactaaagcttatcaaaatagttgtgtaattgctacttacctatcttttgactacgaatacaatacacaacttcttattaaacaagctttatgtgatggcaaacgtgtccttgttcccaaaacttatccaaaaggtaaaatgatttttgtggactatcaaaaagataacttgaggacaacaccgtttggcttattagaacctgttaatgatagagctgttgaaaaagctagtatagacttaattcatgtgcccggacttatctttaacaataaaggttttcgtataggttatggtgcaggttattttgatcgctatttgagtgattttgaaggtgatactattagtactatttataggtgtcagagacaggattttgtagaagagaagcatgacgtagcagttaaggaggtattatgtctatgaagaagttcgctaaagagtatccgacgacagtactcttggtcagtctgacaacccttgtttttttattgatgcaactaacttatggaagtcaagcggagtctagccaagttatttttcaatttggtggaatacaaggtgattatctaaaagcatatccaacaaatctatggagactaataagtcctatctttgttcatattggttgggaacattttttattaaatggtttagctctgtatttcgtaggacaaatgggggaaagtatttggggaagtttgagatttctaattctctatattttatctggcttaatgggtaatatttttacgctattttttactccacatgtggtggcagcaggagcctcaacgtctttatttggtgttttttctgctatagcaatcgcagggtattttggaaaaaatccttatttaaaacaagttggaaaatcatatcaagtgatgatcttgttaaatttattttttaatatcttcacacccggagtgagtttagcaggtcatgttggtggtttagttggtggagtattggtggctatttttttgacaaaacaaaatggttctttattatttaaaacttggcaaagtattttagctttaatgatatttattattgtatcgatcagcttaataggtctatcgttggtataattctacggctatagcctctaaaaccaaactttctctgggaaaaatagaataaagtttgctaaatgatttttttatgttatgatagaaatctgtttttatgtgactataacttattaggaggttcattctcggtgaacagaaaaattattggcttaactctactatctttatctgtactaacattaacagcatgtggtaatcgttcagataagtctgcaaataaatcagatatcaaagttgcgatggtaactaatcaaggtggagtagacgataaatcgtttaatcaatcagcttgggaagggctacaaaagtggggaaaaaagaaggggttgacaaaaggtaatggctttgattatttccagtcatctaatgaatcagatcatgctaataaccttgatacggcagcctctagtggttataatttaatttttggtattggatttggtcttcatgatactattgaaaaagtatcagaaaataataaagatgttaaatacgttattgtagatgatatcattaaaggtaaagaaaatgtagctagtgttacttttgcagacaatgaagctgcttacttagctggagttgctgcagctaagacaactaagacaaaaacagttggttttatcggagggatggaaggcgtcgttgttaagcgatttgaagcaggatttaaggctggagtaaaatcaattgatccggctattaaagttgcggtatcttatgcaggctcatttacagatgcagctaaaggtaaaacgattgctgccacacagtatgcaacaggtgttgatgttatttaccaggctgctggtggtacaggagcaggaatttttagtgaggctaaaactgaaaatgagacccgcaaggaatctaacaaagtctgggtaattggtgttgacagagatcaaagtcaagaaggcaattatgtttcaaaagatggtaagaaagcaaactttgttctggcatctactataaaagaggtggggaaatctctccaatctgtagcagaattaacagagaaaaaacaatatccaggagggaaagtaacagtttttggtctaaaggatagtggtgtagatattaaagagcatcaattgtctagtgagggatctgttgctgtcaaaaaagctaaagaggatattgtttcagggaaaatacaagttcctatgaaatgataaaagtgtggaggaacaataagttcttcgtcaagtacaataaaaaagtttcctatttaggaaacttttttattgtacttgactcatattttacttcttagatgttttttctagagattttcctaaatcaatgatatatttcttcaagtcatctttaacttgtgggtgttgaagagcataatcaatagatgttttcataaaaccaaacttgtcaccaacgtcgtaacggtctcctgtaaattttctagcaaaaacacgttgcgttttatttaaagtatcgatagcatcggttagttgaatctcatttcctgcaccaggtttttgagtttctaaaatattaaaaatttctggagttaacaagtagcgaccaatgattgccaaattacttggagcctcttcgggagaaggtttttcaacgaaagtgttaacgctatatagaccattaactccttctccttgtggagcaataacaccataagcagaaacatcttcatgtggaacttccataacagcaattgttgatgcatgagtagcttcaaagtcattaattaattgtttggtgagaggaataactttattattggtaatatccattagatcatcacctagcataacaacaaaaggttcattaccaacgaaggcttttgcttgtagcacagcatctccaagcccacgaggatgactttgtcgaataaaatggagtcgaatgccagttgtttcatcaacaagtttgagaagttcgtttttccctttctcttttaggttatattctaattcaaaatttgaatcaaagtggtcttctatagaacgttttgatttaccagttacaactaaaatatcttcaattccagattttagtgcttcttcaacaataaattgaatagttggtttatcaacgattggaagcatttctttagctaaagctttagtagcaggtaaaaaacgtgttcctaaaccagcggcagggataactgcttttctgactttcatatatagctcctttaaatagtattaatataaacgatattagtgccattcattctctgaacgaaattcattggacatcatatctaaaatgctatctttgatattagccccttcatatattgatttataaatagcttctgtaatgggcatgtaaacatttaagttttgggcgatttcgtaagcaactttagttgttgagataccttcaataaccatccccatatttttttcaatatcttcaagtttctcaccacgtcctaaagcatctcccgctctccagttgcgagaatgaacagatgtaccagtcacaattaaatctccaactccggataaaccactgaaagtgagagggtcggcccctaattgtacaccaagacgtgttatctcagctaaaccacgcgtaataatagctgctttagcattatcaccataaccaagaccgtgtagtgctccagcaccaacagcaataatattttttagagcaccagctgtttctactcctacgacatcagtgttagtataaagtctaaaataatgattactaaacaatttttggacatacttagctgcttcaatatcttttgaagcagcagtaatcaaagtaatatcacgaacgatggcttcttcagcatgactgggacctgaaacaacaacgatatcactacgatattgttcagagatttcttcttctaaaattgtagaaagtcgttcatgagtaccaggttctagtcccttagaagcatgcataagaacaactttatgctttaaaagattagccacttgtttagcaacaagtcttgtaactttagttgggacgacgaataaaatgctgtcaacattattaatcgcttcctcaagattagtgtaggcttttattttggaatctaaggtaatatctttgaagtaacgttgattagtatggttagtattaatctcttctatttgttcaaccacgtttccccataagcgtacctcatgtccattgtcatttaatacttgtgcaagagcagtcccccatgaaccaggtccaagaacggcaattttttgttttgtcatcttattccttctttctaataataaggcatatagcgctaacattatatcatactctaatacactttgtcttgtttagtctgttgtcaatgatagtaacattagaaaagaattgagtcttttaggttatttatggtataataaaaccaatttagataaatggagcactattttgaaaaaaacctatcgggtaaaaagtgataaggattttcaaatgattttcagcagaggtaaaaatgttgctaatcgaaaatttgttatctactatttagaaaaagaacaaaaacactttcgtgtgggaatctctgttagtaagaaattaggaaatgctgttgttcgtaacgctattaaaagaaaaattaggcatgttttactctctcagaaaacagcgctgcaagattatgattttgtcgtgattgcgcgtaaaggtgtagaggaattggactatcaagcattagaaaaaaatcttatacacgttttaaaaatagcaggactcatctagaaaggtataaaattgaagaaaaaacttaaaacatttagcttaatattgctgacaggctctttattggttgcttgcggacgaggagaagtatctagtcattcagccacattatgggagcaaatagtttatgcatttgctaaatcaatacaatggctctcctttaaccattcaattggtttgggaataatcttattcactctaataatcagagcgattatgatgccgctttataatatgcaaatgaaatccagccaaaagatgcaggaaattcagccaaggctcaaggaattacaaaaaaaatatccagggaaagatcctgataaccgtttaaagctaaatgatgaaatgcaatctatgtataaagctgagggagttaacccatatgcaagtgtattacctcttctaattcagttacctgtcctatgggctcttttccaagctttgactagggtttctttcttaaaagtaggaacatttttgagcctagaattatcacagccggacccatattatattttacctgtactggcggccttatttacctttttatcaacttggttaactaacaaagcagctgttgaaaaaaatattgctttaactcttatgacttatgttatgccgtttatcatattggtaacaagctttaactttgctagtggtgttgttttatactggacggtgtctaatgcttttcaagtatttcaaattctattattgaacaacccatacaagattataaaggttcgagaagaagcagtaagagtggcacatgaaaaagaacaaagagttaaacgtgctaagagaaaagcaagtaagaaaagaaagtaggaaaaccatggtattatttacaggagcgactgtagaagaagctattgaaaaaggactacaagagttaaacatttcacgattgagggcacatataaaagttgtatcacgtgagaaaaaaggttttttgggctttggtaaaaagccagcaaaagttgaaatagaaggtatcaccgacgaagtaactgatattaatgaatcggtagcgttaaaaaatattaagaatgtaccgtctagcgtagatgtggtggaagaatatatagaggaggttgatgaaacgcttgaaaaagaagacgtatcacaaccagaacttccaaaaattgatgataaaaacgttgtaactacaagtgaagctattgaaaaaattgacctacttcctaatattgaagtagcagctgctcaggtgactaaatacgttgaaaatatcatctatgagatggatttagatgcaacaatagaaactacgacaagtaagcgacaaataaatctccaaatagaaacgccagaagctgggcgcatcattggttatcatggaaaagtattaaaatcgttgcagttgttagcacaaaattatcttcatgaccgcttttctaagagtttttcagtatccattaatgtccatgactacgttgagcatcgtacagaaactttaattgatttttctaaaaaaatagctaggcgtgttttagagactaatgaaccttaccatatggatcctatgagtaacagtgagcgaaaaactgttcataaaacaattgcaactatagagggtgttgaaagttattctgaaggtaacgatcctaatagatttgtagtagttactaagaaataaaaagaggtgagacctctttttttcttgcgctctatctacattttcagaaaatgtagaaaaagtatgaaaaaagagttgacaaagtaagagatgatgtagtaaactaaataagttgtctcgagagagcagtttctattagcgcgtagttaacaacttaaaaaaagtagttgacaaagcagaataagtttgctagaatatagaagttgtctcaagagaggcaaagacctttgaaaactgaacaagacgaacgaatgtgcagggtggatttacattgtaaatccgtcaatgacaaaaaaacaataaatctgtcagcgagacagaaaagagcaaagctcaaacttttaatgagagtttgatcctggctcaggacgaacgctggcggcgtgcctaatacatgcaagtagaacgctgaggtttggtgtttacactagactgatgagttgcgaacgggtgagtaacgcgtaggtaacctgcctcatagcgggggataactattggaaacgatagctaataccgcataagagtaattaacacatgttagttatttaaaaggagcaattgcttcactgtgagatggacctgcgttgtattagctagttggtgaggtaaaggctcaccaaggcgacgatacatagccgacctgagagggtgatcggccacactgggactgagacacggcccagactcctacgggaggcagcagtagggaatcttcggcaatggacggaagtctgaccgagcaacgccgcgtgagtgaagaaggttttcggatcgtaaagctctgttgttagagaagaacgttggtaggagtggaaaatctaccaagtgacggtaactaaccagaaagggacggctaactacgtgccagcagccgcggtaatacgtaggtcccgagcgttgtccggatttattgggcgtaaagcgagcgcaggcggttctttaagtctgaagttaaaggcagtggcttaaccattgtacgctttggaaactggaggacttgagtgcagaaggggagagtggaattccatgtgtagcggtgaaatgcgtagatatatggaggaacaccggtggcgaaagcggctctctggtctgtaactgacgctgaggctcgaaagcgtggggagcaaacaggattagataccctggtagtccacgccgtaaacgatgagtgctaggtgttaggccctttccggggcttagtgccgcagctaacgcattaagcactccgcctggggagtacgaccgcaaggttgaaactcaaaggaattgacgggggcccgcacaagcggtggagcatgtggtttaattcgaagcaacgcgaagaaccttaccaggtcttgacatccttctgaccggcctagagataggctttctcttcggagcagaagtgacaggtggtgcatggttgtcgtcagctcgtgtcgtgagatgttgggttaagtcccgcaacgagcgcaacccctattgttagttgccatcattaagttgggcactctagcgagactgccggtaataaaccggaggaaggtggggatgacgtcaaatcatcatgccccttatgacctgggctacacacgtgctacaatggttggtacaacgagtcgcaagccggtgacggcaagctaatctcttaaagccaatctcagttcggattgtaggctgcaactcgcctacatgaagtcggaatcgctagtaatcgcggatcagcacgccgcggtgaatacgttcccgggccttgtacacaccgcccgtcacaccacgagagtttgtaacacccgaagtcggtgaggtaaccttttaggagccagccgcctaaggtgggatagatgattggggtgaagtcgtaacaaggtagccgtatcggaaggtgcggctggatcacctcctttctaaggataaggaaacctgccatttgcgtcttgtttagttttgagaggtcttgtggggccttagctcagctgggagagcgcctgctttgcacgcaggaggtcagcggttcgatcccgctaggctccattgaatcgaaaggttcaaattgttcattgaaaattgaatatctatatcaaattccacgatctagaaatagattgtagaaagtaacaagaaaataaaccgaaaacgctgtgaatatttaatgagttttctagttttaaagaaactaggttaataaggttaagttaataagggcgcacggtggatgccttggcactagaagccgaagaaggacgtgactaacgacgaaatgctttggggagctgtaagtaagcgctgatccagagatgtccgaatgggggaacccactagttaatgactagtatccatatctgttaaggatatgagaaggaagacgcagtgaactgaaacatctaagtagctgcaggaagagaaagcaaaagcgattgccttagtagcggcgagcgaaacggcaggagggcaaaccgaagtgtttacacttcggggttgtaggactgcgatataggattaatcattatagaagaattacctgggaaggtaagccaaagagagtaacagcctcgtatttaaaatgatagattaaccttagcagtatcctgagtacggcgagacacgcgaaatctcgtcggaatctgggaggaccatctcccaaccctaaatactctctagtgaccgatagtgaaccagtaccgtgagggaaaggtgaaaagcaccccgggaggggagtgaaatagaacctgaaaccgtgtgcctacaacaagttcgagcccgttaatgggtgagagcgtgccttttgtagaatgaaccggcgagttacgatatgatgcgaggttaagttgaagagacggagccgtagggaaaccgagtcttaatagggcgtcatagtatcatgttgtagacccgaaaccatgtgacctacccatgagcaggttgaaggtgaggtaaaactcactggaggaccgaaccagggcacgttgaaaagtgcttggatgacttgtgggtagcggagaaattccaaacgaacttggagatagctggttctctccgaaatagctttagggctagcgtcgatgttaagtctcttggaggtagagcactgtttgggtgaggggtccatcccggattaccaatctcagataaactccgaatgccaacgagatataatcggcagtcagactgcgagtgctaagatccgtagtcgaaagggaaacagcccagaccaccagctaaggtcccaaaatatatgttaagtggaaaaggatgtggggttgcacagacaactaggatgttagcttagaagcagctattcattcaaagagtgcgtaatagctcactagtcgagtgaccctgcgccgaaaatgtaccggggctaaaacatattaccgaagctgtggatgacacaaaagtgtcatggtaggagagcgttctatgtgtgaagaaggtgtaccgtgaggagcgctggaacgcatagaagtgagaatgccggtatgagtagcgcaagacaggtgagaatcctgtccaccgtaagactaaggtttccaggggaaggctcgtccgccctgggttagtcgggacctaaggagagaccgaaaggtgtatccgatggacaacaggttgatattcctgtactagagtatatagtgatggagggacgcagtaggctaactaaaccagacgattggaagtgtctggtcaaacagtgaggtgtgatatgagtcaaatgcttatatctttaacattgagctgtgacgaggagcgaagtttagtagcgaagttagtgatgtcacactgccaagaaaagcttctagcgatacatatactctacccgtaccgcaaaccgacacaggtagtcgaggcgagtagcctcaggtgagcgagagaactctcgttaaggaactcggcaaaatggccccgtaacttcgggagaaggggcgctgattttagatcagccgcagtgaataggcccaagcaactgtttatcaaaaacacagctctctgctaaatcgtaagatgatgtatagggggtgacgcctgcccggtgctggaaggttaagaggagtgcttagcgtaagcgaaggtatgaattgaagccccagtaaacggcggccgtaactataacggtcctaaggtagcgaaattccttgtcgggtaagttccgacccgcacgaaaggcgtaatgatttgggcactgtctcaacgagagactcggtgaaattttagtacctgtgaagatgcaggttacccgcgacaggacggaaagaccccatggagctttactgcagtttgatattgagtatctgtaccacatgtacaggataggtaggagcctatgataacgggacgccagtttcgtttgaggcgttgttgggatactacccttgtgttatggctactctaacccagataggcaatccctatcggagacagtgtctgacgggcagtttgactggggcggtcgcctcctaaaaggtaacggaggcgcccaaaggttccctcagactggttggaaatcagtcgtagagtgtaaaggtataagggagcttgactgcgagagctacaactcgagcagggacgaaagtcgggcttagtgatccggtggttccgtatggaagggccatcgctcaacggataaaagctaccctggggataacaggcttatctcccccaagagttcacatcgacggggaggtttggcacctcgatgtcggctcgtcgcatcctggggctgtagtcggtcccaagggttgggctgttcgcccattaaagcggcacgcgagctgggttcagaacgtcgtgagacagttcggtccctatccgtcgcgggcgtaggaaatttgagaggatctgctcctagtacgagaggaccagagtggacttaccgctggtgtaccagttgtcttgccaaaggcatcgctgggtagctatgtagggaagggataagcgctgaaagcatctaagtgcgaagcccacctcaagatgagatttcccatgattttatatcagtaagagccctgagagatgatcaggtagataggttaggagtgtaattgtggtgacacatttagcggactaatactaatagctcgaggacttatccaaaaagagatattgacaacgttacggtttcttgttagactatagatattcaattttgagtgaataaggctcaatagttaagtgataattgcctaggagatacacctgttctcatgccgaacacagaagttaagccctagaacgccggaagtagttgggggttgccccctgtgagataaggtagtcgcttagcaaagggagtttagctcagctgggagagcatctgccttacaagcagagggtcagcggttcgatcccgttaactcccatagaagcgggtgtagtttagtggtaaaactacagccttccaagctgttgtcgcgagttcgattctcgtcacccgctttactttataagaaagtaaaaaccaagcaatagcttgggcgcgtagctcaggtggttagagcgcacgcctgataagcgtgaggtcggtggttcgagtccactcgtgcccatcaagaatatggtccgttggtcaaggggttaagacaccgccttttcacggcggtaacacgggttcgaatcccgtacggactattcttaaaaaagtagaaagtgatctttctactttttttattttaagtatatatttttgcaatagtattgtaattaaatttgatattaataaaaacacactatttagtgtgttagttagcgctttttcaattcaaggtaccgtttataccagatattgatatatgatgatgaaaaggggcctttattctcatttatccattctaccaatatttttacattttcctttaatatataatcaatatcggtaggatagttcatctgagctttatgctgttcatattcgtccacatctagtagtcttttttcaccatctgcaaatactttgacatcaaggtcatagtcaatatacttgagtgcttcagggtccaagatatacggacttgctagattacaatagtaggagacaccagtttcacgtatcatagcgataatgttaaaccagtattttttatgaaagtatactattgcaggctctcgtgtcacccagcgtcgaccatcattttctgttactaaagtatgatcattaacaccaatgagggcattttcggttgtttttaataccatggtgtcacgccaagttcggtgtaaactaccatcatgtttgtaactttgaattgtaataaagtcgccttctttaggtaatctcatagcctaccaactttctacaatttatacgtctgttatagtttatcataattttctgtaaaatacatcgtctgagagttattatcttataaatattctcttaaagcacttttgatatcttcgtactggtatcctttacgcattaaggcattgattatacgttgctttaattcatactggtcatgtttttttgataatttttggtattgtttatctaattctttataaatgaggtcttcttcaagttcttgatctttttcaatttcaaggttttgaattacggtatgcactatctgataatcaaatccttttgtagttaagctctgcatcaatttatcttttaatgcttttagtggaagtttgttttgatattttttatagagtttttggcttattttggatgctaagtcttgaaagtttatagcttgaagttcagattcaattattttacttttgatacctttttgcaataatttttgttttatcacgtatggtcccttatcgccagtatttagattttgctgtatgaaagattgcacgtagtttttatcgtttatccaattctcactttttagattatcaataatttgtggaataattttagaatcaatatcatgttgttgaagatatttaataacttctttctcggttctctgcttgaaagaaatataataaagacctagatttttaccgtatgatagttgggcaaattttttaatattttcaagtttctcggcattaattatcatccctttacttaacataaaatgaacgatagtatcttctgttatatataaattttcggtattgtctagctctagagtgtaaagtctttttttcttttcgattttggttattttcatagtttttattatagcaaaaatgataaaatagtaaaaatgagtctttttttaaatgttatggatttatagtattttcttagttagggagtaatgaactgatgaatgtggttttaaaacagcgaattcctttaaaaattaaacgaatgggaattaatggtgaaggaataggtttttataaaaaaacactaatctttgttccaggggccctcaagggagaagaggtgttttgtcagatttcttctgttagacgtaattttgcagaagctaaactgttaaagataaataaaaaatctaaaaatagggtagaacccccttgttctatttataaagaatgtgggggatgccaaataatgcaccttcaatatgataagcagctagagtttaaaacggatgttattcgacaggctctaatgaaatttaaaccagagggatatgagaattatgaaatccgtaaaacgataggtatgtcggaacctgaacactatcgtgctaaattacaatttcaagtgcgttcgtttggagggaatgtaaaggcaggtttatatgcacaagggacacatcgattgattgatatcaaagattgtttagtgcaagatagccttactcaggaaatgataaatcgagttgcagaacttttaggaaaatataaattgcctatttataatgaacgtaaaatagctggtgtccgtactgttatgattcgacgagcacaagcgagtggagaggttcaactgatctttatcacaagtaaaagacttgattttgatgatgttgttattgaattagttcgagagtttcctgagttaaagacagttgctgtaaatatcaacgctagtaaaacaagtgatatctatggtcaaataacagaagttatttggggtcaagaatccatcaatgaagaagtattagattatggtttttcgttatcaccacgtgctttttatcaacttaatcctaaacaaacacaaattttatatagtgaggcagttaaggccttagatgtgaaggaagatgatgatttaattgacgcttattgtggagtaggaacgattggacttgcttttgctggaaaagttaaaagtgttcgtggaatggatattatccctgaggctattcaggatgctaaagagaacgcactttatatgggttttactaatacacattacgaagctggaaaggcagaggatattatccctaggtggtatagtgagggatttcgcgctaatgcgttaatcgtggatcctcctcgcacaggtttagatgataaattgctaaatactatactaaaaatgcctccagaaaaaatggtttacgtttcttgtaatacatccacgcttgctagagacttagtaacattaacaaaagtataccatgtccactacatccaatccgttgacatgtttccacatacagcaaggaccgaggctgtagtgaaactacaacgtaaggaataataaagttttctaatcaaaaaataagagtatttttgggtattcttatttttagatagtaatggtgagatattaatataacatagtctaaaaacacatggtttaagctatttgatacggaaatttaccttagaaatggtaaatagttccattaagtatattcatctttgcaaatttgaccttgccttttaagtttcattgagttaaaatagaaaaaatatttttaacaagatgatagaacatcgtaaattaaggtttaaaggaaatgcttatgataataaattcattcgataatagtagaaaagcgattattaatcctgaagatattaattcaccaataaaaggttttccaaagactgttattacctgtttcgcgcgggagactttcaatcgtattttagaagaattgcctcatcgtgaaattgctagaactagtgtagcaaacttagaaattcccatttatgaattagaatttaaaggacaaaagattggctttttcaatgcttatgttggtgcttcagcttgcgtagcaatcttggaagatattatagtatttggaatggaaagtttaattgtttttggaacatgtggcgtccttgattcgtcaattgaggagacatccattattattccaagaagtgctattagggatgaagggacatcatttcattattcggaagcaagttctgaaattgcagtaaacacaaattcaatttttttactctgcggataatttagatgcagaagtatgggaagcaagatctttaggaaatagcgaggatttagaaaagaaagataaaattgcttatattgccatggagtttgctatagagactttttagggtctactgtatgatgttgaaaggaagatagcaatgtggaatgtaaaaacttttgataatttaactacacatgagttgtttcaaatatataaattaagagtatctgtatttgtggttgaacaagattgtccttatcaagaggttgatgatgaagatttgatttgtttgcatgggatgaattgggtagatggtcaattggcagcttattatagattgataccagaagatgataaggtgcatttgggacgtgtgattgttaatccagactttagaaaaaagggattaggaaatcaattagtggaatatgcgattaaatttagtgaggcaaattaccctaataaacctatttatgctcaggcccaagcttatttacaagatttttatcaatctttcggatttcaacctgtctcagatatctatctagaagataatattcctcatcttgatatggttttattataaatacatgctatttaaactatcaattaaaaggtctctcagtattgctgagagatcttttaattaacaaaaaattaaaaaatttaaattaaaaaataaaaataaaatttatcgctaattattctattgctaataaattaattatgttgtaatatagtatgcatactgatttttggaggaaataggaaaagtggataaacatcactcaaaaaaggctattttaaagttaacacttataacaactagtattttattaatgcatagcaatcaagtgaatgcagaggagcaagaattaaaaaaccaagagcaatcacctgtaattgctaatgttgctcaacagccatcgccatcggtaactactaatactgttgaaaaaacatctgtaacagctgcttctgctagtaatacagcgaaagaaatgggtgatacatctgtaaaaaatgacaaaacagaagatgaattattagaagagttatctaaaaaccttgatacgtctaatttgggggctgatcttgaagaagaatatccctctaaaccagagacaaccaacaataaagaaagcaatgtagtaacaaatgcttcaactgcaatagcacagaaagttccctcagcatatgaagaggtgaagccagaaagcaagtcatcgcttgctgttcttgatacatctaaaataacaaaattacaagccataacccaaagaggaaagggaaatgtagtagctattattgatactggctttgatattaaccatgatatttttcgtttagatagcccaaaagatgataagcacagctttaaaactaagacagaatttgaggaattaaaagcaaaacataatatcacttatgggaaatgggttaacgataagattgtttttgcacataactacgccaacaatacagaaacggtggctgatattgcagcagctatgaaagatggttatggttcagaagcaaagaatatttcgcatggtacacacgttgctggtatttttgtaggtaatagtaaacgtccagcaatcaatggtcttcttttagaaggtgcagcgccaaatgctcaagtcttattaatgcgtattccagataaaattgattcggacaaatttggtgaagcatatgctaaagcaatcacagacgctgttaatctaggagcaaaaacgattaatatgagtattggaaaaacagctgattctttaattgctctcaatgataaagttaaattagcacttaaattagcttctgagaagggcgttgcagttgttgtggctgccggaaatgaaggcgcatttggtatggattatagcaaaccattatcaactaatcctgactacggtacggttaatagtccagctatttctgaagatactttgagtgttgctagctatgaatcacttaaaactatcagtgaggtcgttgaaacaactattgaaggtaagttagttaagttgccgattgtgacttctaaaccttttgacaaaggtaaggcctacgatgtggtttatgccaattatggtgcaaaaaaagactttgaaggtaaggactttaaaggtaagattgcattaattgagcgtggtggtggacttgattttatgactaaaatcactcatgctacaaatgcaggtgttgttggtatcgttatttttaacgatcaagaaaaacgtggaaattttctaattccttaccgtgaattacctgtggggattattagtaaagtagatggcgagcgtataaaaaatacttcaagtcagttaacatttaaccagagttttgaagtagttgatagccaaggtggtaatcgtatgctggaacaatcaagttggggcgtgacagctgaaggagcaatcaagcctgatgtaacagcttctggctttgaaatttattcttcaacctataataatcaataccaaacaatgtctggtacaagtatggcttcaccacatgttgcaggattaatgacaatgcttcaaagtcatttggctgagaaatataaagggatgaatttagattctaaaaaattgctagaattgtctaaaaacatcctcatgagctcagcaacagcattatatagtgaagaggataaggcgttttattcaccacgtcagcaaggtgcaggtgtagttgatgctgaaaaagctatccaagctcaatattatattactggaaacgatggcaaagctaaaattaatctcaaacgaatgggagataaatttgatatcacagttacaattcataaacttgtagaaggtgtcaaagaattgtattatcaagctaatgtagcaacagaacaagtaaataaaggtaaatttgcccttaaaccacaagccttgctagatactaattggcagaaagtaattcttcgtgataaagaaacacaagttcgatttactattgatgctagtcaatttagtcagaaattaaaagaacagatggcaaatggttatttcttagaaggttttgtacgttttaaagaagccaaggatagtaatcaggagttaatgagtattccttttgtaggatttaatggtgattttgcgaacttacaagcacttgaaacaccgatttataagacgctttctaaaggtagtttctactataaaccaaatgatacaactcataaagaccaattggagtacaatgaatcagctccttttgaaagcaacaactatactgccttgttaacacaatcagcgtcttggggctatgttgattatgtcaaaaatggtggggagttagaattagcaccggagagtccaaaaagaattattttaggaacttttgagaataaggttgaggataaaacaattcatcttttggaaagagatgcagcgaataatccatattttgccatttctccaaataaagatggaaatagggacgaaatcactccccaggcaactttcttaagaaatgttaaggatatttctgctcaagttctagatcaaaatggaaatgttatttggcaaagtaaggttttaccatcttatcgtaaaaatttccataataatccaaagcaaagtgatggtcattatcgtatggatgctcttcagtggagtggtttagataaggatggcaaagttgtagcagatggtttttatacttatcgcttacgttacacaccagtagcagaaggagcaaatagtcaggagtcagactttaaagtacaagtaagtactaagtcaccaaatcttccttcacgagctcagtttgatgaaactaatcgaacattaagcttagccatgcctaaggaaagtagttatgttcctacatatcgtttacaattagttttatctcatgttgtaaaagatgaagaatatggggatgagacttcttaccattatttccatatagatcaagaaggtaaagtgacacttcctaaaacggttaagataggagagagtgaggttgcggtagaccctaaggccttgacacttgttgtggaagataaagctggtaatttcgcaacggtaaaattgtctgatctcttgaataaggcagtagtatcagagaaagaaaacgctatagtaatttctaacagtttcaaatattttgataacttgaaaaaagaacctatgtttatttctaaaaaagaaaaagtagtaaacaagaatctagaagaaataatattagttaagccgcaaactacagttactactcaatcattgtctaaagaaataactaaatcaggaaatgagaaagtcctcacttctacaaacaataatagtagcagagtagctaagatcatatcacctaaacataacggggattctgttaaccataccttacctagtacatcagatagagcaacgaatggtctatttgttggtactttggcattgttatctagtttacttctttatttgaaacccaaaaagactaaaaataatagtaaataaaactaagtaaactactcggcaatatgatgaaaagttcagtttaacattatgttaagctggacttttagggtattgactcttatttttgattaattttatattgattaatgacatataatattataatattataattacgattagtatgtgataccgttcactttgtaagctttcataagatgaactagccttaaggagttttgatagcaatgaaaacgataaaagattggcaaataaatatttgcttagcgacctataatggtcaaaaataccttcgccagcaattagatagcataatacaacaaggttatactgactggatttgtttaataagggacgatggatctactgatgatacagtagctattattaaagaatatgttaatagagattcacgttttatatttattaattctaacgatgacagaaagttaggaagtcaccgcagtttttacgagttggttaactataaaaaagcagatttttatgttttctcagaccaggatgatgtttggaaagaaaatcgtttagaacgttaccttgaagaagcagagaaatttaaccaagaactaccattgcttgtttattcgaactggacttctgtagatgaaaaattaacagtattgaaagaacataatccagcaacagttattcaagaacaaattgcctttaaccaaataaatggtatggttatcatgatgaatcatgagttagcaaagctttgggaatatcgtcaaattggcgcccatgattcttatgttggaactctagcttacgccgttggaaatgtggcttatatttctgacagtacagtcctttggcgtagacaagtaggggcagagtcgctaaacaattacgggagacaatatggggtggctacgttttggcagatgataaatacttcttttgatcgtgcttcgcttatttttgctcaagtatccgataaaatgtccctggagcgtaaactcttctttagtcgttttatagaattaaaaaatgccaatctaatgagaaggatttatcttttatcaaaattaaaactccgtcggaaatcattgaaagaaacagttgctatgactatcctacttttaacaggttacggtaaaccaaaagcataatttttttggttgaaggaaatcaagttgagttgtagttaaaaatatagaaaatatttatttttcaaaaagttgttgacacttaacgaaattagtatataataatattaaagaacaaggtagaaccttggctcgcattaatttcgggttttggaaaaggagtagcaatcgctactccttttttgttttacacaggaaaagtatgaaggtaaagcctttttttataaaaattaggcttgcttaattttttaatttttatattctttacattatgatgaaaacacaagatatagtggtgatatatgttgaaagacacaaaactttgtgttagtatactgtttaagcagatccttaataaaggtaaccgacaaaaaagtttaacgtaacttaacaaaacagtggttttgaagcaagagttagcttcttaccagaataaaaaaacatcaagaagaacattccaatagttgtgtgattttaacaaaaatccagtcctcttgggaggcttttttggtgcttaaaactcgcttaattttaatatttaggagactagtttaatgcaatcatactatgatcgttctcaatcgccacttgactatgccttgtcagaaaaagcttttcctatgcgttctgttaattggaataagctaaacgatgacaaagacttagaggtatggaacagagtaactcaaaatttctggttacctgaaaagatcccagtttctaatgaccttaattcttggagaacattggatgctgattggcagcaattaattactcggacttttactggtctaaccttattagattctgtgcaggctactgttggtgatattgctcagattaagcattctcagacagatcatgaacaagttatttatgctaactttgcctttatggtagctattcatgcgcgatcttatggaacgattttttcaaccttatgcactagccaacaaattgaggaagcacatgaatgggtagtggatactgaaagtctacaagctcgatcacgtatacttattcctttttatactggtgacgatcctttgaaatctaaggttgctgcagccatgatgccaggatttttgttatatggtggcttttaccttcctttttacctttcagccagaggaaaattaccaaatacgtctgatattattcgtttaattttacgagataaggtaattcataactattacagtggctataagtatcaacagaaagttgctaaattatctgtagaaaagcaagccgaaatgaagacatttgtctttgacctcctctatcagttgattgatttagaaaaagcctatctttacgaactatatgatggttttgatttggctgaagatgcaatcagatttagcatttacaatgctggtaaatttttacaaaatttaggatatgattctccatttacagaagaagagactcgtatatctcctgaggtttttgcacaactttcggcgcgtgcagatgaaaatcatgatttcttctcaggaaacggctcttcatatattatggggattacagaagaaacattggatgaagattgggagttttaaatggatagtacagtgaaggtggtctatttttcatcgaaatctaacaatacccatcgttttgttcaaaagttggcttgttctaaccagcgtattccatcagatggtagtagtatattggttactgaggattatattttgattgtgcctacttacgctggaggaggagatgataccaaaggcgcagttccaaaacaagttgtacagtttttaaatgttcgacaaaatcgggaacattgccaaggggttatttcttctggaaataccaattttggtgacacttatgccattgctggacctattattgctcgaaaattaaatgttcctttgcttcatcaatttgaattactgggaacacaagaagatgttacaagggtaaaggagttactttgccaattcactagaaaggataaataagatgacacaatcagatgcatatctctcgttgaacgcgaagacacgctttagagatcgcacaggtaattatcattttacttcggataaagaggctgttgaacaatatatgatagaacatgttgaacctaatacgatggtgttcacatcactaattgaaaagctagattatttggtttctaataactactatgaatcggaccttctaaaacaatataaccttgagtttatttgccaaatttttgagcatgcatacgctaagaaatttgcttttctaaattttatgggggctttaaaattttataatgcttatgctcttaaaacagaagacaatcgttattatttggaacactatgaagatcgtgttgtaatgaatgctctgtttttagctgctggtgatgaaaaagctgcctatgacctagtagatgacatgctagcaaatcgctttcaaccagcaacacctacctttttaaatgcagggaaaaaacgtcgtggtgaatatatctcttgctatttgttgcgcattgaagacaatatggaatctatttctcgtgctattagtacaagccttcagttatcaaaacgaggtggtggggtagcactttgcttaaccaacttacgggaatttggtgctccaataaaaggtattaaaaatcaagctactggtattgtacctgtcatgaaattactagaagattcgttttcttacgccaatcaattaggacaaagacaaggagctggtgcagtttacttacacgctcaccatcctgaagtattaacgtttttagatactaaacgtgagaatgccgatgagaaaattcgaattaaatctctttccctaggacttgttattcctgatattacttttgaattggctaaggcaaataaagatatggccttgttttcaccgtatgacattgagcgagtatatggtaaaccaatgtctgatatctctatcacagaagaatatgaaactttattagccaatgcggatattcgtaaaacctttattagtgcacgaaaactatttcaaacgatagcagagcttcattttgaatctggttatccttatatcttatttgaagatactgtaaatgctaaaaaccctcacaaaaaagagggacgaattgttatgtctaatttatgttctgagattgcacaagttaatacagctagtcaattttcagaagacctgactttcactaaggttggacatgatgtttgttgtaatttaggttctattaatattgcgcgtgctatggatcaagcggcggattttgaaaaattaattgctaatagcattagagcccttgatcgtgtatctcgaacttctgatttagatagtgctccatctattaaaaaaggtaatgcagctaatcatgctgttggtttaggtgctatgaatttgcatggatttttggcgactaaccatatttattacgattctcaagaggctattgattttacagattgcttcttttacgctatggcttattatgcctttaaagcttctaaccatttagcaaaagaaaaaggaacctttgagggcttctcggaatcaagttatgctgatggcagttatttctatcaatataccgaacaaaactttgagccaaaaacacagcgtgttaaaaatctactagctgagtatggtctgactctaccaagccaagaggattggagaaagcttgtgcaaagtattaaagagataggattagctaatgcgcatttattagctgttgctccgacagggtcaatcagttatctttcttcttgtactccgagccttcaaccggttgtatcacctgtcgaagtacgcaaggaaggagcactggggagggtttatgtacctgcttataagattgatgcagataattatgtctactacaaaaaaggagcttatgaagtgggatctgaggcgattatcaatattgcagctgccgctcaaaaacacattgatcaagctatttcgttaacgcttttcatgacagatcaagcaactacgcgagatttaaataaagcctatattcaagcatttaaacaaaaatgtgcctctatttattatgtacgagtgagacaggacatcctagaaggtagcgagagttatgatgatatgctggatgatttcacttcatcggacttagaagactgtcaatcctgcatgatttaactaaatatactcaatcagaagattaagagaaatatattggcttttagaaaggctttattgtaatgacaaaaaaacatcttaaaacgcttgccttggcacttactacagtatcagtagtgacatacagccaggaggtatatggattagaaagagaggaatcggtcaaacaagaacaaacccagtcagcttcagaagatgattggttcgaagaagataatgagaggaaaacaaatgtttctaaagagaattctactgttgatgaaacagttagtgatttattttctgatggaaatagtaataactctagttctaaaaccgagtcagtggtaagtgaccctaaacaagtccccaaagcaaaaccagaggttacacaagaagcaagcaattctagtaatgatgctagcaaagtagaagtaccaaaacaggatacagcttcaaaaaaggaaactctagaaacatcaacttgggaggcaaaagatttcgtaactagaggggatactttagtaggtttttcaaaatctggaattaataagttatctcaaacatcacacttggttttaccaagtcatgcagcagatggaactcaattgacacaagtagctagctttgcttttactccagataaaaagacggccattgcagaatatacaagtaggctaggagaaaatgggaaaccgagtcgtttagatattgatcagaaggaaattattgatgagggagaaatatttaatgcttaccagttgactaagcttactattccaaatggttataagtctattggtcaagatgcttttgtggacaataagaatattgctgaggttaaccttcctgagagtctcgagactatttcagactatgcttttgctcacatgtctttaaaacaagtaaagttaccagataacctaaaggtcattggagaattagctttttttgataatcagattggtggtaagctttacttgccacgtcacttgataaaattagcagaacgcgctttcaaatctaatcgtattcaaacagttgaatttttgggaagtaagcttaaggttataggagaagcaagttttcaagataataatctgaggaatgttatgcttccggatggacttgaaaaaatagaatcagaagcttttacaggaaatccaggagatgaacattacaacaatcaggttgtattgcgcacaaggacaggccaaaatccacatcaacttgcgactgagaatacttacgtcaatccggacaaatcattgtggcgtgcaacacctgatatggattataccaaatggttagaggaagattttacctatcaaaaaaatagtgttacaggtttttcaaataaaggcttacaaaaggtaagacgtaataaaaacttagaaattccaaaacaacacaatggtattactattactgaaattggtgataacgcttttcgcaatgttgattttcaaagtaaaactttacgtaaatatgatttggaagaaataaagctcccctcaactattcggaaaataggtgcttttgcttttcaatctaataacttgaaatcctttgaagcaagtgaagatttagaagagattaaagagggagcctttatgaataatcgtattggaactctagacttgaaagacaaacttatcaaaataggtgatgctgctttccatattaatcatatttatgccattgttcttccagaatctgtacaagaaataggacgttcagcttttcgacaaaatggtgcgcttcaccttatgtttatcggaaataaggttaaaacaattggtgaaatggcttttttatccaataaactggaaagtgtaaatctctctgagcaaaaacaattaaagacaattgaggtccaagctttttcggataatgcccttagtgaagtagtcttaccgccaaatttacagactattcgtgaagaggctttcaaaaggaatcatttgaaagaagtgaagggttcatctacattatctcagattacttttaatgcttttgatcaaaatgatggggacaaacgctttggtaagaaagtggttgttaggacacataataattctcatatgttagcagatggtgagcgttttatcattgatccagataagctatcttctacaatggtagaccttgaaaaggttttaaaaataatcgaaggtttagattactctacattacgtcagactactcaaactcagtttagagaaatgactactgcaggtaaagcgttgttatcaaaatctaacctccgacaaggagaaaaacaaaaattccttcaagaagcacaatttttccttggtcgcgttgatttggataaagccatagctaaagctgagaaggctttagtgaccaagaaggcaacaaagaatggtcatttgcttgagaggagtattaacaaagcggtattagcttataataatagtgctattaaaaaagctaatgttaagcgcttggaaaaagagttagacttgctgacggatttagtcgagggaaaaggaccattagcgcaagctacaatggtacaaggagtttatttattaaagacgcctttaccattgccagaatattatatcggattgaacgtttattttgacaagtctggaaaattgatttatgcacttgatatgagtgatactattggcgagggacaaaaagatgcatatggtaatcctatattaaatgttgacgaggataatgaaggttatcataccttggcagttgccactttagctgattatgaaggtctttatattaaagatattttaaatagttcccttgataagattaaagcaatacgccagattcctttggcaaaatatcatagattaggaattttccaagctattcgaaatgcagcggcagaagcagaccgattgcttcctaagacacctaaggggtacctaaatgaagtcccaaattatcgtaaaaaacaagtggagaaaaatttaaaaccagttgattataaaacgccgatttttaataaggctttacctaatgaaaaggtagacggtgatagagcggctaaaggtcataatataaatgcggagactaataattctgtagctgtaacaccaataaggtccgagcagcaattacataagtcacagtctgatgtaaatttacctcaaacaagttctaaaaataattttatatacgagattctaggatacgttagtttatgtttgcttttcctagtaactgctgggaaaaaaggaaaacgagcaagaaaataaggagaaattaatatgattacacaagaaatgaaagagattattaatagtcagttagcaatggtcgcgacggttgatgctaaaggtcaacccaatattggcccaaaacgttctatgcgtctctgggatgataaaacgtttatttataatgaaaatacagatggtcaaactcgtattaacattgaagataatgggaaaattgaaattgcctttgttgatcgtgaacgtcttttaggttacaggtttgtgggaactgctgaaattcaaacagaaggtacttattacgaagcagcgaaaaaatgggcagaaggacgcatgggggttccgaaagcagttggtattattcatgtcgagcgtatttttaatttacaatctggtgctaatgcaggtaaagaaatcacttaatataaaaaagcctcaagaaggggcttttttatattaagcaatactagattaagtttgttttcgagttattagtaatatctgcgatagcaagccaaatttccatttgataatcagtatcttgtggatgttgagatgaataaatttctaagtttggcgagttagctggttttagattattctcttgaaaaaatccttgtattatttttcgccatgtttcttgaagactcgatggcattggacctttaacagaaatgactgcataggtagcgcttgggatcctaataatttctaacccttttggggcttggacacttgtctctacttgataagtggcactgtaatcgaaacgaaaatcaggttgtgttttacaaatgccaatggcttgctggataccttcttgatttgactttacattttctaaagttactccagcaagtatcattgctggcttttcaacaatttgaaatgatagcataaaaatctttattctttatgattccttaagtaattatagagtcgttaaaatagtttctttttagaataattgtcttgttagcaatcataattttcttttggaatgatatggttcaaagaagaaatcttatgatatagagtattctctaagaggcacttattttatagcttttttctaaaaaaaatctattgactatttttgtttatttctctaaagatgatggattaatctttattctttaataacgccatggtgtctcataagggtaccaacgatttgctgaatgagatgctaatctagaaaatggataaacttctttaccctcttttttcaacatatcttctagataatctctcagcatacaaacatctccaggataagtaacatcaagacttaaaagagattcaacttcactgatattaagttgcaagtctttagcaacttgtttaataggataatttaaccttctaaaattttcttgtaattcaaaggttgtatctttcatttcttgaatagtaagcatatcattctcctaatagttggtttaataattggttgatctttctttttggcttttgggaaagtatctctcttgctatgtctgttattttatatccaaatttccttagctttattaaaggctgaccaagcttttggccatccaacataaaaagcgaggtgagtgataatgtcagcaatttcttctttagtaactccgttttgtttggcaaattgaagatgatgctctaactgttcaagatttcctccgctaattaaggcagatatagtaataatagaacgtgttttatctgttaaatgatcctcttttgcccaaacctcaccaaataaaatatcatcattatatctggcaaattcaggtgcaaattcttctaattgacgacgtccggctgtttgtttttctttcataatggattcctccttacttgaatttaacctagtcttgaatattcttcatcactaacagcttcataaaactcactcttaccagctgtaatcgcaatatgtgcaaattcagaatcttttttagcaccatgccaatgtctaacacctttatctgtaacgataacgtcgcctggttttaatgacactgcttcttttccttcttcttggtaccaacctgaaccttctgtaacgagaaggatttgataaccgtccaaatgaacatgccaattattacgacagcctgcttcaaaggttacatttccaactgaaacattcccatctggagattttgctaatgctgcgagataggattgcccaataaagaattcaccatatggatttttttcacccttaggaaagatagacttagttgtttcttgcataagatttcctcatttcgttgttggatcaaaaagttcttgttctctaggaacaactttattttgataattgtctattttgtgatttagacgattaagtgcttcttggaggccttgaagcctatcttcaagattgtcgcgttcatcttttaaaatttctagcctagctgggatagtggaatcgcctttttcaaccaaatgaatataatcaatgagactttcaacggaaacacctgcgcctctaaaatagcggacaaattctaaaatatcaatatcgttttgtgtgaactcacgaattcctgattcactccgatgaatagggggaataagattaattctctcataatacctgatggtatctgacgtaatgccagtctttttactaacttctttgatatgcatttttaacctcgatattcagtcaacaatcactaaggatttgatagcgtcacgtttatccattgcttcataagccttttgaatatcatctaatacaaaggattttgtaaaaactaagcctgggttaattttatgagttagaacagcatctaaaaggacagacttatcaaatgttgttacagaagcaatgccacctctaaggccgatatttttccagaataaattattggtattcatgtctggattttgtgggataccaacacgtcctatgacagcaccaggcctagcaatttgggtagctgtatcaacagactgctctgtaccaacacattctaaaacagcatcggcacctgcttgattggttaaatctaaaacacgtttaacggcttcgtcaccccgttcttcgacaatatccgttgcaccaaaagtcaatgctagttcctgcctatctttgtgacgactcattgcaatgatacggttagcacctaacattttagcagcgataacaccacagagtccaacagcaccatctcccatgacaactaccgtgtcaccttctttaacttctgcagttgctgcagcatgataaccagttgccattacatctgataaggtgagcagagagttaagagtctcattatcataatcagaaggttgtcctgggatcttaaccaatgcccagtttgcattagtataacgtagatattgaccttggtatcctacattttttgcagcttgatgatttgtacaatttccatcaaatccagccttacaagacggacattggccacagccatgtgtaaagggaacaataacaaaatcaccttttgacacgtcagttactttagtaccaacttcctcaacgataccaatagcctcatgacctgcaaaagaaccactttcacgttttgaaataccacgataccaccacaagtctgaaccacaaacacaggctctaacaattttgataacagcatctgtctcttgttcaatgactggttttggtgtatcagttataaccattttgccaggttcaataaatgtagctactttcataaccttacctcttttctataacttcattataactcttagagttaacttcaagtcaagaaaaacttaaaaattttgaaaattaaacatctgtaaaaatccgcatatggtttcattttccactaaaaacagggaagttagaaaattccccataatcgtcaaacataagtgattttaatatcgacatatcttcgtcactaattacaaagtcaaagtctagattagactgtaaatgttctttactagaagcctttggtaaaacgatcaggtttaattgtagtaaatattgaatacataattgagcaacactaaccccatatttttcagccattttttgaataccatcagatttcaatgcttgtccatgtgcaattggtgaataggcttcaacttgaatacctttactttgacagtaatcaatcaagtcgaaaggtgtatttccgatgtgagctaagatttgattgacagcaggtttaacatgaccattttttaagatattttctaagtctttttctaaaaagtttgagacaccgatggatttcatcttaccagatttttgagcatcctctaaagctctccaagcttctaaatttccttggtcaaaatgtttatctgtttcacgccattccttccaaggctgtggactatgaataatcattaaatcaatataatcaagccctaaagcttctagtgattgatcaattgattttgtagcactttcataatctttatgttcagcggcaattttagtcgtaacaaataaagattcacgtgtaataccagactctttaatccctacaccgacacctttttcattgttgtatgcttgtgcagtatcaatatggcggtagcctaattcgatagcatctttaacaacttgagctaccctatcattatctatcatccacgtacctaaacctaaagttggtattttatgattgtcatttaatatcattgtatctgtcatctttattttccttctttcattagtattgacctaatcttaacacttagagttaactccaagtcaaggaaaaaactaacactcaggttagttttttaatggtttgcaatgattttgatgttctcttaaagaataatcgatttcaacagtaacatcgtttatcttataatgttggcaaatcgttcgaatagctcttttacaatctttttcagatatcaattgatttaagcaacagtgaatgattgctcgattatcaataccatccattgaccagatattgagttgattgatagatcttacttgcgaaagtcccttaagttcatcatgtaatgcagcgtaatctatggaatctggaacaccatctaaaaaaagtttcagggttgatagtaatttaggaagtgctttagataagatgaaagtagatatggcaactgataataatggatcaaggatatacaacggtttccaatttaagataagagatataacaataatagctaaccaccctagaatatcttccaaaaaatgaaggcttaatatttcctcatgtttactttgaccagaatggagaataaaactagctagaccattaatgataatagcgatgacagctagaataaacatgccgtgataattaacaggagtaggatgccacaattttgggatattttctatcatgactaagatagatccacttataagaattagacttgtgataagagctcctaaaaggctaaaacgtttataacctaatgaaaatatcgtatcttcatctttcttagattttttttctaaagtagctgagatgccaatagctattgcatcaccaaaatcatgaacagcatcggctaagatagctcctgagaagaatagacttccaaagatgaattcaaggacggaaaagctgatatttaatataaaagcgatagccacttttttgtttgatgtcatatttttctccttttgttatactggtattgtagtgtgattctttcttctattatctaggagataaaagagaattgctagaaacaaaaaagaacacttgttcaatactgaacaaaacttagaaagtgtcctatatggtaaaagatagacaaattcagaaaacaaaagtagcgatttataatgcttttataagcttgctacaggaaaatgattattctaaaataacggttcaagatgtaatcggacttgcaaatgtaggaagatcaactttttactctcactatgaaagcaaagaagtgttactcaaggagctctgtgaagacctttttcaccacttatttaagcagggtagagatgttacgtttgaagagtatttagttcatatcttaaaacattttgaacaaaatcaagatagtatcgctacgttattattatctgacgatccctattttttattacgctttagaagtgaattagaacacgatgtttaccctagattgcgtgaggagtatattacaaaggtggacattcctgaagatttcttaaaacaatttcttttatccagttttatcgagaccttaaagtggtggcttcatcaaagacagaaaatgactgttgaagatttactaaaatattatttaactatggtagagaggtaaattatagagagttgggagattctcttatttcattagcgttatcagaggtgatgaatggattgattgtctaatatagcgagttgaaattattagattaaatgagtataattcgggagataaaaaagtccccttgatgaaagagtttctttgggattgttgatgtcaccataagcaaaatgaatatttttcgattactatattgtcttaggcttttgcttatattctagtgggctaattcccactatttttttaaatgtccttgaaaaattagaagaagtggaaaatccaagtaaattggaaacttcttctactttcttattttcatctagtaattgcttagcagcttcgatttttaagtttagaaaatattgttgaatagtgatgtgtttttcttgcttaaatagttttcgtaacttcgattcactcatgtgacattctttagctatttcttctgttttaataaagcgatttagattattttcaagatatcgaatcactgcgacaatagtttgagaatgaggggtttcgagatgtttttttaaagaatgaacttgttgagtatagaataagatagcagtatcacgtaattttaaaacttcatttagacttatagttgactcgttttcttttataaaacgatctcgtgctcgataagctgtttcgatatcaagtcctgcttggatggtagcctgtgagagacgatcataaatcatgatggagtagtttttttcagatcgcaattcatctccactgattataggtacgatagaattgctaaattgttccactgtttctttcaaaagaaattcactacctgatttaacagcttttagaatattattttcaaaatgatactgatatttgtaagaactcatattctgtttagaaaattgcttaattttatctagatcaaaggagttgctccaccctttcgtgtagtaatgtaagggctctgataatttatctttcacaaccccagttagacaataattggttactattagtaattctcggatttgactaagtgagaagaaaggtaattgggatagtctatcaataaagtagtcttgttcactagcattgatttgtgtttcagtcagctttttcttaagaagtaaagggtcaataacattgctacgccagggaccgatgataatataatattgttgaatatggtggacaagaaaaagttctcctaaagagccataatgaaataaaaaatcatgttgagttttactaaagttacttaaaataaggtaatgattgtaaaaaagtgaaatagttttctcggatttatactctctgataacagaaaaattttgatcacaaacagtaatagttagacctagaagactgtgtaatgatttcaacagtagaaaatcaatcatatgagttaccacctttgatttaatatgttatctattttagagaatatttctttaaagtcaacagaataattaggtagtcgatacctttttaaccaaatatgaattaaaaaaccgaaaaagtcaaatcagaaaaaaaaaaaaaaacagattagatcggataaaaaagtatagatattctaatatttgtttttaaagcctatactttactatgtatagagctatacagaataaagtaaaggagaatattatgtttagaaggtctaaaaataacagttatgatactttacagacgaaacaacggttttcaattaagaagtttaagtttggtgcagcttctgtactaattggtattagttttttaggaggttttactcaagggcaatttaatatttctacagatactgtgtttgcagctgaagtaatttcaggaagtgctgttacgttaaacacaaatatgactaaaaatgttcagaatggtagagcatatatagatttatatgatgtgaaaaatgggaaaatagatccattacaattaattacgttaaattcacctgatttaaaagctcagtatgtcattaggcaaggcggcaattatttcacacaaccttctgaattgactactgttggtgcagctagtattaattatacagtattgaagacagatggaagtcctcatacgaagcctgatggacaagtggatattgtaaacgtttcattgactatttacaattcttcagctttgagagataaaatagatgaagttaaaaagaaagcggaagaccctaaatgggacgagggaagtcgcgataaagttttgataagtttagatgatatcaaaacagatattgataataatcctaagacgcaatcagacattgccaataaaataactgaagttactaatttagaaaaaatactagtacctcgaatcccagatgccgataagaatgatccagcaggtaaagatcagcaagtcaatgtaggtgagacaccgaaggcagaagattctattggtaacttaccagatcttccgaaaggtacaacagtagcctttgaaactccagttgatacggcaacaccgggagacaaaccagcaaaagttgttgtgacttacccagatggttcaaaagatactgtagatgtgactgttaaggttgtcgatccacgtacagatgccgataagaatgatccagcaggtaaagatcagcaagtcaatgtaggtgagacaccgaaggcagaagattctattggtaacttaccagatcttccgaaaggtacaacagtagcctttgaaactccagttgatacggcaacaccgggagacaaaccagcaaaagttgttgtgacttacccagatggttcaaaagatactgtagatgtgactgttaaggttgtcgatccacgtacagatgccgataagaatgatccagcaggtaaagatcagcaagtcaatgtaggtgagacaccgaaggcagaagattctattggtaacttaccagatcttccgaaaggtacaacagtagcctttgaaactccagttgatacggcaacaccgggagacaaaccagcaaaagttgttgtgacttacccagatggttcaaaagatactgtagatgtgactgttaaggttgtcgatccacgtacagatgccgataagaatgatccagcaggtaaagatcagcaagtcaatgtaggtgagacaccgaaggcagaagattctattggtaacttaccagatcttccgaaaggtacaacagtagcctttgaaactccagttgatacggcaacaccgggagacaaaccagcaaaagttgttgtgacttacccagatggttcaaaagatactgtagatgtgactgttaaggttgtcgatccacgtacagatgccgataagaatgatccagcaggtaaagatcagcaagtcaatgtaggtgagacaccgaaggcagaagattctattggtaacttaccagatcttccgaaaggtacaacagtagcctttgaaactccagttgatacggcaacaccgggagacaaaccagcaaaagttgttgtgacttacccagatggttcaaaagatactgtagatgtgactgttaaggttgtcgatccacgtacagatgccgataagaatgatccagcaggtaaagatcagcaagtcaatgtaggtgagacaccgaaggcagaagattctattggtaacttaccagatcttccgaaaggtacaacagtagcctttgaaactccagttgatacggcaacaccgggagacaaaccagcaaaagttgttgtgacttacccagatggttcaaaagatactgtagatgtgactgttaaggttgtcgatccacgtacagatgccgataagaatgatccagcaggtaaagatcagcaagtcaatgtaggtgagacaccgaaggcagaagattctattggtaacttaccagatcttccgaaaggtacaacagtagcctttgaaactccagttgatacggcaacaccgggagacaaaccagcaaaagttgttgtgacttacccagatggttcaaaagatactgtagatgtgactgttaaggttgtcgatccacgtacagatgccgataagaatgatccagcaggtaaagatcagcaagtcaatgtaggtgagacaccgaaggcagaagattctattggtaacttaccagatcttccgaaaggtacaacagtagcctttgaaactccagttgatacggcaacaccgggagacaaaccagcaaaagttgttgtgacttacccagatggttcaaaagatactgtagatgtgactgttaaggttgtcgatccacgtacagatgccgataagaatgatccagcaggtaaagatcagcaagtcaatgtaggtgagacaccgaaggcagaagattctattggtaacttaccagatcttccgaaaggtacaacagtagcctttgaaactccagttgatacggcaacaccgggagacaaaccagcaaaagttgttgtgacttacccagatggttcaaaagatactgtagatgtgactgttaaggttgtcgatccacgtacagatgccgataagaatgatccagcaggtaaagatcagcaagtcaatgtaggtgagacaccgaaggcagaagattctattggtaacttaccagatcttccgaaaggtacaacagtagcctttgaaactccagttgatacggcaacaccgggagacaaaccagcaaaagttgttgtgacttacccagatggttcaaaagatactgtagatgtgactgttaaggttgtcgatccacgtacagatgccgataagaatgatccagcaggtaaagatcagcaagtcaatgtaggtgagacaccgaaggcagaagattctattggtaacttaccagatcttccgaaaggtacaacagtagcctttgaaactccagttgatacggcaacaccgggagacaaaccagcaaaagttgttgtgacttacccagatggttcaaaagatactgtagatgtgactgttaaggttgtcgatccacgtacagatgccgataagaatgatccagcaggtaaagatcagcaagtcaatgtaggtgagacaccgaaggcagaagattctattggtaacttaccagatcttccgaaaggtacaacagtagcctttgaaactccagttgatacggcaacaccgggagacaaaccagcaaaagttgttgtgacttacccagatggttcaaaagatactgtagatgtgactgttaaggttgtcgatccacgtacagatgccgataagaatgatccagcaggtaaagatcagcaagtcaatgtaggtgagacaccgaaggcagaagattctattggtaacttaccagatcttccgaaaggtacaacagtagcctttgaaactccagttgatacggcaacaccgggagacaaaccagcaaaagttgttgtgacttacccagatggttcaaaagatactgtagatgtgactgttaaggttgtcgatccacgtacagatgccgataagaatgatccagcaggtaaagatcagcaagtcaatgtaggtgagacaccgaaggcagaagattctattggtaacttaccagatcttccgaaaggtacaacagtagcctttgaaactccagttgatacggcaacaccgggagacaaaccagcaaaagttgttgtgacttacccagatggttcaaaagatactgtagatgtgactgttaaggttgtcgatccacgtacagatgccgataagaatgatccagcaggtaaagatcagcaagtcaatggtaaaggaaataaactaccagcaacaggtgagaatgcaactccattctttaatgttgtagctttgacaattatgtcatcagttggtttattatctgtttctaagaaaaaagaggattaatcttttgacctaaaatgtcactaaacttttcaccatttattggtgtgaacacattaataaagttatgtatctctcttcaacaaacttaattaaagtgtttcaatttttcgagtttaattcttgaaaaatcctatcgagattattaatttcgataggattttgattttgtgtaagcgtccaataacgaggtatcttccattttcttccctattccgtaagcatccaatataccttgttattggacgcttactataaaactgaagaaatgatcctatttagttgaaatttgtaaatgaagtgtatcattagagcctaagatgttaatcctaggctctcttttgatgatttaaaatttttaggtgtaatcaaatgtaaggttagatgcaaaattttctaaaatgactgtttgtcttttcaagtaattaaatgtatttaagggtaatttataaaaataaaaggagtgtgtcaataatgttgtgtaaacacactggcaaagctgggattgttaatcaaataggctttcaagtgtgtctgtacattggccaaaacctttgtggattcgttgttcttgcttgaagttgtaatcattaaatagtgtgactagatagtattctagagcctcttcattgggaaagacgatttccttttttgtttgcgttgtattgcatttagtgatacaatagttatacaaaaatgatttgaggtgatattatgtcaacagtagcagtaagagttgatgatcaattaaaagatgatgctacagaactttttcaatccttagggttggatatgagcacagcagtaaaaatgtttttgattcaatctgttaaaactcaaagtattccttttgaaataaaaaataaatcatctgtttctgatgaagaatttcaaaatttggtagaaacaaaattaaagggaatacgagttaaggctagtgatccagaaagtgtaaatgcgttttttggagatgaagatttttcagaatatgaggaatattttaaatgagtgatattgaggtatattctgtattagtttctcgtattgaatattctgatggtacaggttcaaaggttcgtcctgctgtagtagtcaaatttaatgatgaagtaataaaaactttaagatttactactaaatatgaaaataagtctgacaatataagaagtcagtatttagaagttattgattaggcaaaagcaaatttaaataggcgttcttggatagatactattcaatattatgatgttgagaataaagggttcaatattaaaattataggtaagttaagcgatagagatgttgagaggttaaaagattttctcatagcaaaggaagtttagttatgaaaaagaaattattaggattgatgattttagctatatctacagtatttttagttgcttgttcgactaattcgttaaatgtaaagtattataaagtatatgatggtgaaaaaatgttagttttagaaattaatgatgaatcaggaatttatcataatgaaggaaactttgtagtaactaatattgatactaaaagtaaaagttttgtacttaaaggtgggtctgctaagtatactgttttatatgatgttaaaagtgatggtaaattgaatgttgatttagggaacttttattataatgcttctggtaaggagacatattataaagaaggtagcaaggctttagaaaaagcattaagagataaagaataaagttaggactattttcctaacttatttttttatttaaaaaatgaacttcaaaatgcaaagtcttaattttacttagcacctaatttttagttaaataatttgtatcccagcaataaaaagtatttttaccgaaatcaaagtaagaaccaaaaagaagatggggttactctgtcttagtttttcttggaaagtgttatctgttaattcaatgaaatcaagcgaggaaatgagatagcttttatttaattgatgagttgctttttccagattatttggagttatttgctcgtattcagaaataatattatgttatgatatcataaagagctaaattcatggtttgatttttatttctttgaaagttactaacgatcgtacttatttctttattgttcaaattggaataatctttaagtagatggaaaagtcgtatttctaaacattcctttgaaatttctaaatcaatggttatttctttgaatagtttattttcgtaaacaattttatagagtaacttgggatgatattgattttgaaagaaatagtatttatacatatcgaagatattcttcaataaaaaatgactttacaaagcctaaaacaaggacttcaataaggagagtttcagtaagtcatgatttaaaagagttattgcttgaactaaaatttcaacaagaaagaatgctgaaaggtttgcatataaaaaatacagatcaattgattttttatgactataggtttggtatgatatcaaatgatgctgttaacaaattcttggcaagctcattggaaaaattagaaatagaatctaagatgtcatcaacaggtgctagacatacttatggaagttatttgttggctaacggagtagatatttgggcggttgcaaaattaatggggcataaagatatcaaacaattaatagaaacatatggtcatttgcttctgtaagtggaagaaaaggaaaatgatcagcttttaaaaattcttaataataaaggtagtttttaaaatgactatcaagaacaaattaagaacaaaaataaaagaaaccctattataataaggtttcactcatatattttctgccaccaccgagaattgaactcggaattgagcattaccattgctctattataccatttaactatagcggctacttttctatgatactataagattttgacgaaatcaagtatttctttacttagaaaaatagtcgtttttttagtctaattctatttggagaaatttactattttcaatagctcttaaatggtgtgtttcttgtggagagaggctaataaggctatctttttcaaggatatgtttctgatcaccaaggataatttcaagttttctttccaaaacatttattaattttggatgagggcatcgttcatttttcagtccccggctgatgattttaatggtattgaataaaccttcatctttaatcattcctaacggggacataagacttatttttccaaattgatattctgaactttaaaaaccattttgtaagaataaattttgccaatcatctatttttagaggagcaacgttaacattcatagtatgtctaagttgatcgatcagcttggcagtgtcttcatcttgataagaaacatcatgtgtgagtaaacgtccaccaggttttaggacacgtaagtactcttttatggctttctccttagctgaattgttaagcatcgttaacattgcttcgttgataacgataaactattatcaggaaagggcagtctgagtgcatttccctgaataacttcaataaattcttctaattgggcctttttgacattttctttggccttttctattactttactatctagatcaagcgctgtaatgtgacaggaaaatgctttagcgatatcgatggaactggtacattgattacaagctacttctagaacacgactgtcagcactaaagtgtccttttttgataagccaattcgttgcttggacacctcctggtcttaagcgttttttcctagtcgtgctaagaattgatgtccaatttctttatgtggcaataagatcacctctttcttttaatagtaatatcattttttcttaattataacacatagatgctaagataacaaggagtaatagtgattgaatggtataagtgatgaattttagagagcgttttcttttaactaggggtgtgatgccaaaactagaatggcatagagaaccatacatctcaaaaggtcttccttagataaaactagttgtttttatatctgtcagaaaaatcataatttatttttgatataatgattttttgagtatttaatttatatgttataatgaaaaaaactaaaaaagaggaatatcatgtcatacgaacaagaatttttaaaagactttgaagagtggttacaatcgcaaataagtatcaaccaaatggcaatggacagtgcaaagaaagttttagaggaagataaggatgagcgagcagcagatgcgtatattcgttatgagagtaagttagacgcttatcgctttttgcaagggaaatttaataactatcataaccaaaaatctttccatgatttgcctgatggtctttttggacaacgtcattattaaaaggtttatcgctagaaagcttgtcaaataggcatttctatgatacattgttatagtagtttttagatactatgatagatttcataaatgaggagaaagcattatacaatggcaaagcgtattaaaccgaataaaaaaagagagcttttgaaagctaaagggatcaattggaaggatgttcgactatctcaaactttacaagaagtcgcattaccgaaaaagacggctcctgaagcgccaaaggcagtcgatcttttagaaggtttaactgctaataaacaagatgttttaaaagaagctggccttgtcagccttgaagcatttgcgaaagtaagtgaagcagatgttttagcactaaaaggtattggtccagcagctattaaacagttagttgataatggtgttgtttttgcaaaataatttgatttaccttgcgaaagtagccttattttgctagaataaattaacttagaggtgttttgaaatcccatttgtcacaggaagcggtcatactgagaaatccgcacaaatgtcaaagcttgttgctaagtccaataattgaaacaaaacgagttgcggatgttatcatccgaatttgggtggtaccgcggaaatcgtaacacgaaattcgtccctgtcagaattgacagggattttttgtatttaggagtgaggagattgaagtatatgcagattctagaagatttcgatggcaaagcattaccaaaactagaaacggatcggcttatcttgcgtcagcgaacggtgggggatgtcccagccatgtttgattacgtttgcttggaagaggttgcctatccagcaggactcagcccaatagcttctttagaagatgagtacgattattttgaaaatcgctactatcaaaatctggaaaaggcaaaattaccatctggttatggtattaccgttaaaggaagtgatcgtattatcggatcctgcgcctttaaccatcgccatgaagacgatgttttcgagatttgctatctgcttcatcctgactactggggtcatggctatatgacagaagctgtcgccgctttgattgaagtcggttttacccttctcaatctccacaaaatcgaaatccgctgctatgattacaataagcaaagccggcgcgtggcagaaaaactaggattcacccttgaagctaccattcgtgatcgtaaggataatcaagacaatcgctgtgtcaatttgatatatggtttgctgaggagtgagtgggagtaattattctactcttcatagaagttactagatcgactaatttggctgtgcagggcacttaactaagtcatcaataatatcgtagatatggaggagacaaatgattaagatacttggagaaatcgtagataaccagctacctgttgtggaaacgaatcgtctgttgttgcgtcaacgcaagttagaagatgctaaggagatatttgaatttgtcaaacttgatgaggtgagttatccagcaggttttccggctgttaaaagcttggaagaagagataacctatattcaagagatttatccaactaatcttgaaaaagaaaagttaccctctggttatgctattactctaaaaggcgatgataaggtaattggttcagtagattttaaccatcgccacgaagatgacatttttgaaattggctacctgctccaccctgattattggggacaaggcattgtgccagaagcagcttcagcccttgtggagataggtttcacactgctaggactacataagattgagctgggatgctatgactataataagcaaagtcaggcggttgcgcgcaaattaggttttactttagaggctaatattcgtgatcgaagagatgcccaggggaaacgttgtggcgatatgcgctttggtttactgcgaagcgagtgggagaaaaaaagaagatgaatattattatcatcggagcacaagcttctgggaaaatgacaattggtcaggaaatcgcaaaacagacaggcatgaccttattccataaccatgattctatagattttgttttacgcttcatgccatggtctccagatagtattgctctaacggagtctattcgctttaaattttttgaaacgtttgctaagactggtcaagaaatgatttttactattgtaattgatttcaatgattcaagagatgtagtatttctagaaaagattcaaatagtttttcaatctcacaaccaagaggtattatttgtagaattagaaacagagctaagtgagcgtctcaaacgaaatcgcacagaaaatcgcctcaagcataagccttcaaaacgtgatatcaaatggtcagagagcgatatttgttcaaccatggattacgctatctttaatcctgaagtagccccagaagcgcttacatattatcataaaatcaataatacttgcttaactgctactgaaacagcatatcttattattcaaaaaataaaccaaatcaaggagaaaaactaatgtcaaaagaactatcaccaaaatacaatcctgccgaggttgaggaaggccgttatcaaacttggcttgaccaagatgttttcaagccatcaggggatactgaggctaagccttattctatcgtaattccaccaccaaacgttacgggtaaattgcacttgggtcacgcttgggatacaactctacaagatatcattattcgtcaaaagcgtatgcagggctttgatacactctggcttccaggtatggaccacgctggtatagccactcaagctaaggttgaggagcgccttcgtgagcaaggcatttcacgttatgatcttggtcgtgaaaaattcctagataaagtttgggaatggaaagacgagtatgcagcaactattaaatctcagtggggaaaaatgggtctttcggttgattatagccgtgagcgttttacccttgatgagggactttcaaaagcggtaagaaaagtctttgttgatttgtacaataaaggttggatctatcgtggggagttcatcattaactgggatccagcagctcgcacagccctttcagatattgaagttattcacaaggatgttgagggtgctttctatcatatgaattatatgctggaagatggctcacgcgccctagaagtagcaacaactcgtcctgagactatgtttggagatgtggctgtagcggtaaatccagaagatgcacgttacaaggatttgattggtcaaaatgttatccttcctatcatcaataaacctattccaatcgtcgctgatgaacacgctgatccagaatttggaacaggtgtggttaagattacgccggctcacgaccctaatgactttgctgtaggtcaacgccacaacttaccacaagttaacgttatgaacgatgatggtactatgaatgaacttgcggatgaatttaatggtatggatcgtttcgaagctcgtaaggcagtagtcgctaaattagaatcgttaggaaacttagtaaaaattaaaaaaacgactcattctgttggtcattcagaacgaacaggcgttgtggttgaaccacgtttatctactcaatggttcgtcaagatggatcaattggctaagaatgccattgccaaccaagatacagaagacaaggtagagttttatccaccacgatttaacgatacttttatgagctggatggaaaatgtccatgactgggttatctctcgtcaattatggtggggacaccaaattcctgcatggtacaacgtcaatggtgagatgtatgttggagaagatgccccagagggtgacggatggacacaggatgaagacgttctagacacatggtttagttctgctttatggccgttttcaacaatgggatggccagacaccgaagcagctgacttcaaacgctacttcccaacgtcaaccttggtaactggatacgatatcatcttcttctgggtatcgcgcatgattttccaatcccttgaatttacaggacgccaaccattctcaaatgttcttattcatggactcatccgtgatgaagaaggacgtaaaatgtctaaatcactcggcaacgggattgatccgatggatgtcattgagaaatatggtgcggatgcccttcgttggttcctctcaaatggttcagcccctggtcaagatgtgcgtttttcatacgaaaaaatggatgcttcgtggaatttcattaataagatttggaacatttcacgctatatccttatgaataacgaaggtttaacgttggatcaagccagagaaaatgtggaaaaagttgttaatagtcaagttggaaatgtaacagaccgttggattctccacaatttaaatgagactgtgggtaaagttactgaaaactttgacaagtttgaatttggtgttgctggtcacatcctttacaactttatctgggaagaatttgctaattggtacgttgagttaacaaaagaggttctttatagtgacaatgaagacgagaaagtcatcactcgctctgttcttctttataccttagatcaaatcttgcgtcttcttcatccaatcatgccatttgtgacagaagaaatttttggacaatatgcagaaggatcaattgtccttgcaagttatccacaagttaacgcgacatttgaaaatcaaacagctcacaaaggcgttgaaagcttgaaagatttgattcgttcagtgcgaaatagcagagcagaggtcaatgttgctccatctaaaccaatcactatcttggttaagacaagtgacagcgaactcgaaagcttcttcaaagacaatagcaactacatcaaacgcttcacaaacccagagacgcttgaaatcagctcagcaattgccacaccagaacttgccatgtcatcagtcatcacaggtgcagaaattttcctcccacttgctgacctccttaacgttgaagaagagttggcacgacttgaaaaagaacttgctaaatggcaaaaagaactagatatggttggcaaaaaactcagcaacgagcgctttgtagctaacgctaaaccagaagtcgtccaaaaagaaaaagataaacagaccgactaccaaactaaatacgacgcaaccatagcacgtattgaagaaatgaagaagttggtgaggtaaaaaaataaaaaaacgctatcataaatgatggcgttttttgatataatttgattatggatctttagagataataagtagaaattgtgcagccttattatgtatagtcgctttaaactgtttgatgctagttcttatgctataataactctatcaatgtcaaaggagtttttatgtcaaaggtaaggtatggtgttgtgtcaacggcaaaggtggcgcctcgttttattgaaggagtccgcttagcaggaaatggtgaagttgtggctgtatcgagtcgaactcttgagtctgcgcaagcttttgccaacaaatatcatctcccaaaggcttacgataagttagaggatatgttagcagatgagtcaattgatgtgatttatgtggcaacaattaatcaagaccattataaagttgctaaagcagctctgttagcgggaaaacatgtgttggtagaaaagcctttcacattgacttacgaccaagcgaatgaattattcgctttggcagaaagttgtaatctgtttttgatggaggcacaaaaatcggtatttattccgatgacacaagtgattaaaaaattacttgcctctggtgaaataggagaagtgatctccatctcatctacaacagcctacccaaacattgaccatgtaacatggtttagagaacttgagttaggtggaggaacagtgcattttatggcgccctacgccctgtcttatttacaatatctatttgatgcgactataactcatgctagtgggactgcgacttttccaaaaggtcaaagcgatagtcaatccaaactactcttgcaattatcaaatggggtcctcgtagatatcttcttgacaacacgtctaaatttaccgcatgaaatgattatttatggaactgaaggtcgtctaatcattccacatttttggaaaaccactcatgcaaaattggtgagaaatgatactagtgcgcgaacgattcaagttgacatggttagtgattttgagaaagaagcttatcatgttagtcaaatgattttagaagggcaaagggtaagtcatatcatgacgcctcagttgacgctgtcaggtgttaagattatagaagacttataccgttcatgggggaaatgatgctggctatctagcatattaataaggagtactagatgttattttagtagtccttttttgttttgctctcataaggttaattagatttaaaagggttttctacttgttttttctcgatttttatttcataatgtagacaagtttagagtgaggtgcttctatgttttcgagcgattttggatttgagataattaatgttgacgacctatccttgcaagaggagagatttttaccttcagaattgctggcttatgcacgtgatgaaaatgagtcttctttcgtacgtgatattgaggggcatttggcacttgtttaccagcttttggatacgcaaggtcacgttgatgatgttcgtcatgtgccgagagtgataccagtgactctatttttgaaagaagatggcttgtttgtattagctaatcataaaaatattaaccttgtaaaaaaagcacttaatcgtgttgaaaaggtagattctccgaaacacctcttattatcattagtgactgctttctcaaagcaatattttgatgttttagatactatttctgaagaaagagataaactaatcaatgatttgcgtaaaagaccaaacaaatcgaacttggcaaggctggcaaatttacaaagtggaacagtacacttaatgatgggaactaagcaaaattttgaaatgctgaccgatttacaaaacattgagcaagataaagagaacactagaaatgaaaagatgcaacttcaagatgctattattgaagcaagacaattatctaacatgtgttccttaaattcacaggttttccaagaactttcttcttataataatgtcctcagcaataaccttaacgacaatgtaactactttaacaattatttccattggtatttccattattgctatggttaccagtttttatggaatgaatgttaagttgccttttgatagtgtggatgctgtctgggtattgattattttaattacgactatcattactattatgctctctattgttatgtacatttagagtctgtcaataatcttgtgtaaacactctagcaaagctgatattgttaatcaaataggctttcaagtgtgtccgtacattggccaaaacctttgtggattcgttgtccttgcttgaagttgtaatcactaaatagtgtgacgagatagcgttctagggattcttcattgggaaagacgactttctttttggtttgacgtttgatttctttgttaagtgattcaataaggttggtcgagtagatacttccccagatctgatgaggaaattcataaaagatcaatagattttcgattgattctaaggtctctattaccttcttgtagtgtggtttccactcattgataaagctatctaaggcttgctttgcttcctctacattgatcgcgcgataaattgttttaaactgctccaaaattagagcacgatctgctcgtttcaccttacttgcaatatttcggccaatatggacaaggcaacgctgttgtttggccattgggaaggcttgctggataagctgatcaagtccattaaaaccatcactcacaacaagagagacttgttgtacaccttgacccttaaatctttctagaaggtctgaccacgaagcattgttttcattgggtgcgatgtcatatccaaggatagccttatgcccatatgatgtgacgcctagtgcaatgtggatgcattccttactaactgtaccacgtctcagaggaaggtaagtcccatcaagatataatacggtatagttagcttctaaggaacgttcatgaaagctagccacgttttcctgtgtcgctttcgagatattagatactgttgctggactgtaatgatgaccatacatacgctcaatgatgtcgctgatttcacgtgttgtgactccagttcgataaagcttgataaccatttcttctaaatgattgtctcgacgaccgtaacttgggattaaggctggactgaactccccgtttcgatctctagggatcaacaaattaacaacaccatacttggtctcaaatcgacgtgtataagcaccattacgactattaccggtgttgtaacctgccttatcgtatggttcatagccaaggaaggcggatagctccacttggagaaggtcattcatggcagtttcaagagacgaacggaaaaattcatcaatatcttgtttttgagctaggaagttaagtaattctgtggtaaactgggtcatgggaataaatctctttctagtgaagtctcgcaactctactatacaggatttattcctttttgtgtttacacaagatattttacactacctacatttatgtccataaagaggataatcatcccaaacataaatagagaattaataagagggtactatcaattagtttagttttaagcatggtaacatgctttttttgtacgaagaaactttagcgcaaggcagaattcatctttgactttgagcttgctttctagctcttaaaacgacataatagaggataatgtacagtgaatagagaggttactatgtcaatagaatcagattttttccggaaaaaacgttttattttttcatcgcttgaggagtttggatttatcaaatctgaccaagagtatatctattgtcaaacatttatggataatgactttaaagctattatcacgatttcattggatggaaagatagctggtaaggttattgattcggcacttgaagaagaatatttaccgcttcgagcagcaaattataatggttcgtttgttggcgaagtacgatcggcttatatggctatattaggtgatatttcagattcttgttgtaaggacttattatttaccaaagatcaaagtaatcgtttagcggagaagatagctaaaacttttgaagattcagttgattatccatttgcgaagcacccacaatatgcttcctatcgtgtgtcaggtaaatggtatgctctgctttttccattgaagatggggaaactagaaaatgttccagctcaactgtcagaagatgaggttgaagttttgaatattaaagtcaatcctcaagatatggaaatacttttacaaaaagaaggtatttatccttcttatcatatgtctaaaaagacttgggtatctatcgttttagacaatactttgtctgatatagaaatttttaaattggtatcagatagtcgtaagcttgtttctcacaataaaaaatcaaattctgagccagagttttggattattcctgctaatcctaaattttacgatattgataaggagtttgcagagcatcaattgattgattggactcaaaaaggaaagattgcggtgggagattatgtgtttatttatattacagcacctattcgtgcttttcgctatgtctgtcaagtgatagaacgtgaccttaaaacaagtacttacttaggagcaagagatgtcaaagcttatatgcgactcaaactgataaggcaatttgaagattctacctatcctgtagcatttttagcagaacacggcgttaagactgtgagaggaccacggcgaatgaccaaggaattgcgacaagtcatggcaaaaacaattctagagtaatgactttcagaaaaaacttgtaaaaaagtcagaataattctacaattcctcttccattttgttacttgaaggagtataatagctctaacattttataatttaaggaggaacatatgaagaaaagctttattcatcagcaacaggagatttcttttgtcaaaaatacttttacacaatatttgattgataagttagaaatcgtcgaagtgcaaggacctattcttagtcaggtcggggatggtatgcaagataatttatctggtattgaacatcctgtatcggtgaaagtccttaatatacctgaagctgaatttgaagtcgttcactcattggctaaatggaaacgccatactttggcaagatttgggtttaatgagggagaaggtctttttgttcatatgaaagctcttcgtccagatgaagattctcttgatccaacacactcagtttacgtagatcagtgggactgggagaaggtcattcctgatggtagacgtaatttggactatctaaaagaaactgtggaaaaaatctacaaagctatccgcctaacagagcttgccgtggaagctcgttttgatattgaatccattttaccaaagcgtattacctttattcatacagaagaattggtagaaaaatacccagacttaagccctaaagagcgtgaaaatgccatcgctaaggagtatggcgcagtctttttgattggtattggtggagagttagcagatggtaaaccacatgatggtcgtgcaccggactatgatgactggacaacaccatcagaaaatggttttaaaggtctcaatggtgatattttagtgtggaacgaacagcttggaactgcctttgaactatcatcaatgggaattcgagttgatgaagatgctcttaaacgtcaagttgttctcaccggtgatgaagatcgtttagagtttgagtggcataagacgctattacgtggtttcttccctctgactattggtgggggaattggtcaatcacgattagctatgttcttgcttcgtaaaaaacatattggagaagtacagtcaagtgtctggccaaaagaagtcagagatacctttgaaaatatattataaaaaatcagccaagcagttttgtttggctgattttaacaataagtttatttttggcttaagaaagtttggatttgttgaggtgtagcttggcttccttgaacaagatatttagtcatttttccttgttgataatgtgctaaatttggaacagtggtaatatgatgctttttgaaaaaactcttcaatcgtttccctttgtatttttgactatcaaggtagtaaatttttgaatgaagtgtggcttgagattttaataattttggtaagaaagctctacaatattggcaagttggacgtcctataaaaatagtcgcttcagattgttgacttttgcttactaacgccttatctgtgatggcgattaagtcactatttgttatcatgtgttggtattgttgttgagaaatagtcatggtgtcagcgctacttaagtttgattttagcgttgtaaggcataatatggctattaaagttaataatagttttttaatcattatgggaacctcgtttctcttactgctagcttatcatatcaaaaaagaaggaaaagagatactatcttctctgtttgttataagcaattttttgataactctaccttattttttgttataatagtggttatgagagtagtagcaggaacatttggagggcgtcctttaaaaacgcttgatggaaaaacaactcgtccaacaactgataaggttaaaggcgctatttttaatatgattggtcctttttttgaaggtggtcgtgttttagaccttttttctggcagtggtagcttagctattgaggcgatctcaaggggaatggaccaagctgtcctagttgaaaaagataggcgtgcgcaggtcgttattcaagaaaatattgcaatgactaagagtccggagcaatttcaattattaaaaatggaagccaaccgtgctttagaacaattaacgggacaatttgatttggtcttgttggacccgccatatgctaaggaagaaattgtaaagcaaatccaaatcatggatagcaagggtttattaggcgatgatatcatgattgcttgtgaaacggacaaatcagttgatttacctgaagaaattgcttcttttgggatatggaaacagaaaatttatggcatttctaaagtaacggtctacgttcgttaggaggctttggtatggattacaagttagtgatgattattctcatcttagtcatattgatttatttgttgttgcgccttcactatttagaagagttgctaaaacattatcacttcaaaaatgatgaaggagtttgttcattatcaagaacaaaaaatccattgtatctattaatggcaatgattacttttttgccaaatcttatcaattggatagctaatggttttgaggcaatagacattgttcgcctgattcctgtggtagtctttttatggttgtattattgtggagatgacgacgaatgacaaagaaagctttatttacaggttcatttgatcctgttactaatggacatttagatattattgagcgcgccagctatctatttgatcatgtttacattgggttattttataaccttgagaagcaaggttacttttcgattgagtgccgtaaaaaaatgttagaagaagctatccgtcagtttaagaatgtttcagttttagtggcgcaagatagactggctgttgacttagcaagggaagtgggagcaaaatattttgttcgaggtctgcgtaatagccaggattttgattatgaagccaatttggagttttttaataaacagttggcagatgatattgagacagtttatttatcaacgtcgccatctttgagtccgatatcatctagtcgcatccgtgaattgatacattttaaggcttctgtgaagccttttgttccaaagagtgttgttagagaagtggagaaaatgagtgaagaatagagatccaaaaagaaaacataaaagtttactaggtctgcttaaatggtggattataggttttgcttttttattgttagtattagcaagccttgtagtgagactaccttattatttggaaatgccaggtggagcttatgatatccgttcggtattgaaagtgaataaaaaggctgataaagctaagggttcgtacaattttgtagcggtatctgtcagtcaagcaacgccagctcaggttctttatgcttggttaactccttttacagaattatctagtaaagaggagacaacaggtggctttagtaatgacgattatctcagaattaatcaattctacatggagacttctcaaaatgagtccatctatcaagctttaaagttagctaataagcaagtatctcttacttataaaggagtttatgtgcttaacttagctaaaaattcgacatttaaagatagattacatttagctgatacagtcacaggagttaatggcaaaagtttcaaaaattcttctcaacttatcaaatatgttgcagctcttcatctaggtgataaagtaaaggtacaatacacaagtcaaggtaaaaagaaagaatcagttggtaaagttattaaactatcaaacggtaaaaatggtattggtatcggtttgacagaccatacagaagtattatctgatgttcctgtggactttaatactgaaggtgttggaggaccaagtgcaggtttaatgtttactttagcgatttacgaccaattggttaaagaagatttacgtaaaggacgtaagattgcaggtactggtactattgagcaaaatgggcatgttggcgatattggtggagcaggtttgaaagttgtttcagcggctaaaaaaggaatggatattttctttgttcctaataatccgatcgataaaaatgctaaaaaaggcaaaacaaaggttcagacgaattatcaagaggcaaaagcagcagctaagcgattaggtacgaagatgaaaattgtaccagttcaaaatgttcagcaagctattgattatttgaaaaaaacaaaataaactcaaagagttcgggcgtctgctcggcttttttgttttgcgacatttgactatcaaagtgctaaaatgatagtatgacagagcttataagaatactacatttaaatgatctgcactctcattttgagaattttcctaaggtaaaacgattttttcatgacaatcaagcgcagccaatagagacgatttcacttgacttgggggataatattgataaaagccatcctttgacagaagcaagctcgggaaaggctaatgtccaattgatgaatgaactgggtattgagcttgctactattggtaataatgaaggagttggtttatccaaaaaagacttggaccaagtctacaaagattcagattttacggttattgttggcaatctaaaagataacataatcgaaccgagttgggcaaaaccttacattatttatgagacgcagcaaggaactaagcttgcctttttagcttatacttttccttattataaaacctatgaacctaatgggtggacgatagaagatccaattgactgtcttaaatgccatttacaaataaatgagataaaagaggcaaattgtcgcattttgatgagtcatttaggtattcgttttgatacaaggattgctcaagaattttcagaaattgaccttattataggtgcacatacacaccatttatttgaggaaggggagctaattaacggtacatatcttgcagcagctggtaaatatggtcgctttgttgggagtattgatataacttttgataatcatacactaaaagatattttaatctcaacatgtgatacaaaacaactaactggttatccttcggacagtgactggctaagaagattgagtcagaaggtaaagaacagcttagaaaagaaagtttaatatcctttccagcaccattatcattagaagaatcgtaccaactagtcatggatgcgatgctgttttacgcaggtgcagatgttgctattatcaattctggcttaattgttcagccatttgaaaaagacttttcgaggaaaaatctccacgaatcattacctcatcaaatgcgcctcgctaaattgacagtgagtagtcaagaacttttagagatttatgaaactatttatcaacaaggtcaatttttagcgcaacaaaagattcatggtatgggctttcgtggcaagtgctttggagaagttttacattcgggatttgattacaaaaatggaaaaatagtgtataatgagaaagatattgatgccaaagaagaagtgattcttgtaatcgttgatcagtattattttgcatcgtattttgagtgtttaaaaacgaaaaaagtagacttgcttttcctgaattactcagagatgtggcagcagattatttaataaatatgacactataaatgaaaaatagataaataaagagtagaagctagtcgtttctctcaatgattttagagaaaggagtattatgcgaaaagaagtgacaccagagatgcttaactataataagtatcctggcccacagttcattcactttgaaaatatcgttaaaagtgatgatattgaatttcaacttgttattaatgaaaaatcagcttttgatgtgactgtctttggacaacgtttttctgagattttattaaaatatgattttatcgttggcgattggggtaacgagcagttgaggctaagaggcttttacaaagatgctagtacaattagaaaaaatagccggatttcacgtttagaagattatattaaagagtattgtaactttggttgtgcttattttgtgttggagaatccaaatcctagagatattaaatttgatgatgaaagacctcataagcgtcgtaagtcaagatccaaatcacaatcatcaaagtcacaaactagaaataatcgttcccagtcaaatgccaatgctcattttacaagtaaaaagcgtaaagacacaaaacgccgtcaagaacgtcatattaaagaagagcaagataaggaaatgacctctgcaaagcagcattttgttattcgtaagaaaaaataagaaagggataaactgtaaccgtttattccaccatgaagaaagaaaatattatgcctaaaaaaactgatacacccgcctataaaccctctatttatagcttaactcgcgatgaactaatagcttgggctattgaacatggagaaaagaaattccgtgcttcacaaatctgggactggctctataaaaagcgtgtgcaaagcttcgatgaaatgactaacatttccaaagattttattgcacttttgaacgagaattttgttgttaatcctctaaaacaacgtattgttcaagaatctgctgatggaactgttaaatacctttttgaattacctgatggcatgctgattgagacggttttgatgcgtcaacattatggtttatcagtatgtgtaacgactcaagttggttgtaacattggttgcactttctgtgcaagtggtttaataaagaaacaacgtgatcttaacaatggcgaaatcactgctcaaattatgcttgttcaaaaatattttgatgaacgtggacaaggtgagcgcgttagtcacattgtggtcatgggaataggtgaaccctttgataactataccaatgtattaaaattcttgcgtacagttaatgatgataatggattagctattggtgcacgtcacattacagtgtctacttcaggtttagcacataaaattcgtgaatttgcaaatgaaggtgtacaagttaacttagcagtatctcttcatgctccaaataacgatttacgatcaagtatcatgcgtattaatcgttctttccctcttgaaaagttgtttgcggctattgaatattatattgagacgactaaccgtcgtgtaacatttgagtatattatgttaaatggtgtcaacgataccccagaaaatgctcaagagttagcagatttaacgaaaaagattcgcaaattatcttatgtcaatttaattccttacaatcctgtctcagaacatgaccagtatagtcgtagtcctaaagagcgtgtagaagctttctatgacgttttgaagaaaaatggagttaactgtgttgttcgtcaagaacatggtacggacattgatgcagcttgcgggcaattacgttcaaacacaatgaaacgcgatcgtcaaaaagcgaaggtagggcagtaatgcttaaaagattacttactgaagatggggaattgacaaagattagtcgtcgtttcgtttggatgttagtgattatctattgtcttattattgtcaggatgtgttttgggcctcaaattatgattgagggggtatcaactccgaatgttcagcgcttcggaagaattgtagctcttttagtaccatttaattcttttcgtagtttagatcagctaactagctttaaagagattttttgggttattggtcaaaatgtagtgaatattttactgctgtttcctctcattatagggttactatccctaaagccaagtttacggaaatataaaagcgttatattacttgctttcttgatgtctattttcatagagtgtactcaagttgttttagatattttaatagatgctaatcgggtttttgaaatcgacgatctatggacaaataccttaggcggtcctttcgccctatggacttatcgaaacataaaaggttggcttctaactattagaaaatgaaaataatgtaaaggctatgatattgttcaagccttttactatttaaaaagaatcactttagttgacgaaagtaagcttatagaggcataatagagagttgttaaatgagaattttaaaacacttttcatgtcttctgacttaattatgatgtttttcaatctttgagaaaggaaaaatatgtctattataaaaaatttgtggtggttttttaaggaagaaaagaagcgctatcttattggaattttgtcattaagtttggttgcggtgttaaatcttatccctcctaaaatcatgggatcagttattgatgctattacaactggaaaattaacaagaccacaattgctctggaatttattaggtttggttttgtcagctttagctatgtatgggctgcgttatatttggcgtatgtatattttagggacttcttacaaattgggtcaagttgtcagataccgtttatttgaacattttacaaaaatgtctccttctttttatcagaaatatcgtacaggtgatttaatggcgcacgcgaccaacgacatcaattctctaacacgtcttgcaggaggaggagttatgtcagcagtggatgcctctatcacagcattagtaacgcttatcaccatgttctttactatttcgtggcaaatgacattaattgcggttatccctttgcccttaatggccttagcaactagtaaattggggcgaaaaacccatgaaaccttcaaagaatctcaggcagccttttcagaattaaataataaagtgcaagaaagtgtctctggcgtcaaagtgactaaatcatttggttatcaagaacaagaaattgcttcttttcaagaggttaatcagatgactttcgtgaagaacatgcggaccatgacttatgatgtcatgtttgatcctttagttcttctttttataggtgcctcctacgtattaacattggctatgggagcttttatgatttcaaaaggtcaagttactgttggtgacttggtaacatttgtgacgtatttagatatgttggtatggcccttgatggcgattggtttcttgttcaatatggtacagcgtggtagtgtttcttataaccgtattaatagcctacttgagcaagaatcggatataactgaccctttaaatcctatcagacctgttgtcaatggaacattaagatatgatattgatttctttagatacgacaatgaagaaaccttagccgatattcatttcaccttagaaaaaggtcaaaccttaggtttggtaggtcaaacgggatcagggaagacaagtcttattaagttattgctacgtgaacatgatgtgactcagggaaaaattactttaaataaacatgatatacgtgattatcgattgtctgagttacgtcaactaatcggttatgttcctcaagatcagtttttatttgctaccagtattttagaaaatgttcgctttggaaatccaactctatctatcaatgctgttaaaaaagcaactaaattggctcatgtttacgatgacattaaacagatgccagcaggatttgagactctaattggagaaaaaggagtctcattatctggtggacaaaaacaaaggattgcgatgagtcgtgccatgattttagatccagatattcttattttggatgattctctatcagcagtggacgctaaaacggaacatgccattattgaaaatcttaaaacgaatcgtcaagggaaatcgactattatttcagcacatcgattatcagctgttgtgcacgcagaccttatcttagttatgcaagacggcagagtcatcgagcgaggtcagcatcaagagttgctaaataaaggtggttggtatgctgaaacgtatgcctcacagcaattagaaatggaggaagcatttgatgaagtctaatcaatggcaagtctttaagagattaatctcctatttacgcccttataaatggtttacagtattagctctatctctcttattgttgacgactgttgttaaaaatattattcctttaattgcttcacattttattgatcactatctgacaaatgttaatcaaacagcagttcttattttagtgggatattattcaatgtatgtcttgcagaccttaattcaatattttgggaatctcttttttgcgcgtgtttcttatagtattgttagagatattcgtagagatgcttttgctaatatggaaaggcttggcatgtcttattttgataggacaccggcaggatctatagtgtcacgtattactaatgatactgaagcaatatctgatatgttttcgggtattttatcgagttttatctcggcgatatttatttttacagttactctgtacactatgttgatgctagacattaaactaacaggacttgtcgctcttttattacctgttatctttatattagtgaatgtctatcggaaaaaatcagtcactgtcattgctaaaacgagaagtttacttagtgatatcaacagtaaattatcagaaagtattgaaggaattcgcattgtacaggcttttggtcaagaagagcgcttgaagactgaatttgaggaaattaacaaagagcatgttgtgtatgccaatcgttctatggctcttgatagtctcttcttaagaccggcgatgtctcttttaaaactcctagcatatgctgttcttatggcttattttggatttacaggagttaaaggaggtcttacggcaggattgatgtatgcttttattcagtacgttaatcgtctctttgaccctttaattgaagtaacgcaaaatttttcaaccttacaaacatcaatggtatcagcagggcgtgtgtttgatttgattgatgaaacaggttttgaaccaagccaaaaaaatacagaagcttttgtgagagaaggaaatatcgaatttaaaaatgtatcattctcatatgatggaaaaaaacaaatccttgataatgtttcttttagtgttaaaaaaggtgaaacgattgcttttgtaggagcgacaggttctggaaaatcatctattattaatgtctttatgaggttttacgaatttcaatctggacaagttttattagatgggaaggatattagggattactcacaagaacaattgcgaaagaatattggactcgtcttacaagacccctttttatatcatggcactattaaatctaatatcaaaatgtaccaagacatcaccgatcaagaggtacaggacgcagcagagtttgttgatgctgatcaatttattcagaagttgccagataagtacgatgcagctgtttcagaacgtgggtcaagtttttcgactggacaacgccaactattggcgtttgccagaactgtggctagtaaacctaaaattttaatcttagatgaagcgacagcaaatattgattcggaaacagagcagattgtacaagattcgttagcaaaaatgcgtcaaggtcgaacaacaattgccattgctcaccgcttatcaaccattcaagatgctaattgtatctatgttcttgatagaggaaagataattgaaagtgggaatcacgagtctttattagacctaaaagggacttattatcgtatgtaccaattacaagctggcatgatggaggtctagaaaatttagactattcaaaaggcataatctgtgaggtttagaggttggagtagttattcctctaagccttttttatattttacaattagtgtataatgaggtcaaagtgcaaggaaaggtctataaaatgttactattggtagataattacgattcttttacctataatttaaagcaatatttaagtgtctataaagaggtattcgtcataaaaaatgatgttcctaacctttttttattagctgagagcgcagaagccatcgtcttatcacctggaccaggacacccaaaggatgctgggaaaatggtagaattaatcaatcagtttataggaaagaaacctattctaggtatctgtttggggcatcaagcgcttgccgagtgcttgggtgggcgattaaatttagcaaatcacgttatgcatggtaaacaaagttgggtaacaataaacgaccatactagtttgtttaagggaattgatagtccaacccaagttatgcgttatcattcattggtagtgactgatttaccagagaatattgctgttattgcacgatcaaatgaggataatgaaatcatggcattccattgccccagcttaaaggtatatgcgatgcagtttcatcctgagtcaatcgggagtattgatggaatgaaaatgattgaaaactttttgacgttaattaatgactaaaatgtgttagtgtaggataatgactctctataaataaaagacagtaccttaggtactgtcttttatttagttgtatagatgagttaatctgtttgcaaatttacgataaataatcaagcaaatggatgcttttaaggtatccccaggaataaaaataaggttagaaaatagtgatttagttaagggtagagaagtttgaaaggaaagaacgatgctaccacaaatatcaatcaatagtacgccaaatatccaaataataaggaattgaacccagagttttgttgttttcactttctcaagccctaggccgataaaaaaagctgcaaatggataagtcagcagatagcctgctgttggcccaaacagcgttacgagacctgaccgtcctcctggtaaaaatggtgcaccaatagcaactaagagcaagaaaatagccacagctaggaaacccttcctactaccaagcagagcacctgccagcataacaccaagattttgtaaaacaattgggactggaatgaaacctaatgggatccctgggataaaacctaaaacaataagtagtgcaaccatgagtgcaatataggtagttgttcttgttttcatttaaattaattcctttttagtatgatttagttgtaatttttccaagaattcaatatcggtatgttgattgcgaccgccctctgttaggtaatttcccaaaaaagttgagtcaacaagtaaggtgactaatgattcaaaattctcaaaatggacctctcgtccagcgcttaatcttaattccttgaaaggaaaaacaaaacgcaacatggccataatttttaagcatttaatgggagtcaaatagttatattttccaagaggtgttccttcaacagcaagtaaaaaattgacagggatagaataggggtccagctcttttagtctgaaagctaatgtgatgagcccctcatcgctctctcccataccacaaatgaatccagaacaaacatcaatgtcttcattgtgaattctttctaaagtatcacaacgatctttgaagctatgcgtcgttgcaatgttggggtagttttcttcgggggtgttgagattatgattgatacggtcaattcctgcttgttttagctgatgaagttgttctctatccaaaaaaccagcggtaaggcatatttctagagggaggctttttttgatttcagggatgacttgacataactgctcaatttctctcttgctaggcttagttccactcatcgcaatacaaaagacgctagcaccattttgatgagcgacaatagcctgttttagaatgacattttgaggaagcagaccaaatttatcaatgtcagcagtgctttctttagattgagaacagtaaccacaattttctgcacaaagtccttgcttagcacttaataaaacgttaaggcgaatattatttcggctaacttgatttttaaggtataaggcagcagcgtagatttcccaccagttctcatcgctatttagaatttccagcgcttgttcataagaaatgctagtctttccagataatatttcgtcagccaaatggatataatttgtttgaaatgacatgatagcctcctttaacgaaattaataatagcataaaaaaactatattgtaaacttagtcgatgtcataagttaacaatataaaaattatgatatactggtcttatattttgacgggagataagatgaaaaaactatttaaaaaagcgatagctatgtgccgagatttgccgcttaattttgtaattgttgaacttagtttgtatcaaagagaggatggctcatctgataatattaaatggatttctaagagaattcttgaggtaacggtaactgatcagcaatggatttaccatttgaggatgcttaatttaccaaaacttaagccaatgtcactagcatccagtgactgtcctgcaagggaagagaaggctagtcttatttcaatagaagaatgtcaaaaattcactagcttagtgcgagataaaaatccttttcaccaaggggaagcagctattgtgcctgcggctctattattggaaaaaataatggaagttagaaaaggaaaaataaaggagattcatttgacttttttatctccagtaagggtgaatcaagaattctcagtgcaagtagtggataacacagtgattatttttcagcatcaaatattatggtgaggggaacatatgaagaatagagatgtttatattggttttgggctacgaacacctatcggtataaaagggaagcaatttaaacattaccgtccagaacttttaggagcacaccttttaaatcaaataaaaaaaatagaatcagaatctaacattgatagtattatttgtgggaacacagttggtactgggggcaatattggtcgtttgatgactcttttttctgattatgaatcctatattccagtacaaacgattgatatgcagtgtgcttcatcaagttctgccttgttttttggttatctaaaaatcagtaccggtattaatgaaaaagttcttgttggggggattgaaagtagttctcttcaacctatgagacgttatgctaaagaagataatcgtaacggagaatatacagttgctcagttttctcctgactcttatgctgaaactgtaatgttagaaggggcccagagagtctgtcaaaaatatggttttagaagagaaatgttagataaattggcattcttgagccataaacgcgccttaacagctaaacaaggtggctatttagaagaggtaatcttaccaatggaagggatgcgagatcaaggcgttagaaaactaaaagaaacattttttcaaaaattaccaagattgatggaaaattcacctttgctcactattggaaatgtttgtttaatgcacgatgctgctgcatttctaacgcttcagagtcagaaaacagaattccggattgttcacattgtagaagtagcaggagatcccaagcttagtccagaattggttcacacggctacggaaaaactattaacagaaactcatactaaaatatcggattatgatgcaattgaatggaatgaaccatttgcagcgattgatgctctatttaatcattattatcctgaagagagagaaaaattcaatatttttggagggacattagcttacggacacccttatgcctgctcaggaattattaatatccttcatcttatgcaggcattaaaatataaaaataaacctatgggtctaactgccattgcaggggcaggaggagtcggaatggccatatcaatagagtacttaggagttaagaatgcttgaatcattgaaaacgatagttaaaaccaatagcgataaaaagttatttgatggtgatttacaggtcagttatggagaattttataacttagtaagacaagatatggcgtcacaagacaataggaaacatgtgattagcacacactctctgcttaaccaattagtaagatttgtttcaaagttatgtcaaaaagctcttcctattatttgtaaacctaaccttactcataatgaaataagtcgattagaaaaagaagtgcagtatgctcctcaactagctgattttggtgttctttcttctgggactacagctgatgctaaactattgtggaggagcttcacttcgtggtctgatttttttagcattcagaatgcttatttttcggtcacttccaatagcaaactgtttattcaaggtgatttttcatttactggtaacttaaatttagcgctatcccttttattactggggggaacacttgttgtcacacagaaaaattctgtaaaatactggcagactttatgggaaaaaactggtgtaacgcatctatatctgctccctagttatctcaagttagtggaacaatatagcaaggagactgcgttagacaataaaactattattacctcttcgcaatatgtctctgactcattactggaaggtttatatagaaagcatcctaaagtgtcagtgaaaatcttctatggtgctagtgagctcaattatgtgtcatggtacgatggtcgtgatatccgagataagccacagtatgttggagaaatcgttccaaatgtagctgttaggattaaagagggaagaatttttgtaaaaacaccgtatagtatctgtggcctttcaagtgaatattgtgctggtgattatggtgaactgatagatggcaaattatatctatttggccgtggtggtgattggtgcaatcaatcgggcattaagctctatttacctagattaatcgaaaaaataaaaacatgcccttatatcaaggatgcagtagcatttacaaaagagagtcaaagtcatggacaagagtcacattgctgtattgttttaattgaaaatcagatgcaacaagagtgtttgaagtggttatcggaacattttgaaaagaagtatgggtttaagcattatcatattgtatctaaaattcctttgatgccatctggaaaaattgattatcaacaactcaaaagacagttagcatgagcttttactaaaaaaataaaatagggttaatggattgtaaacctcagttctgatattctttattttgaaagatatcgtgatataatgataaaaaagaaagataaggaataaaatgttatcaaaagcaaaatcacgatatattatccgtgagattattaagttatttccagatgctaaacctagcttagactttactaatgtctttgagcttttggtagctgtaatgctatcagctcaaacaactgatgcagctgttaataaagttacacccgccctttttgaacgctttccaaatcctttagttttggcacaagctgatcccaaagagattgaaccctatatttctaaaattgggctttaccgtaataaagctcgattcttaaatcaatgcgctaaacaattgatagagcattttgatggaaaagtcccccgaactcgtcaagagctagaaagtttggctggcgttggaaggaaaacggctaacgtggtcatgagtgttggatttggtattccggcttttgccgtagatactcatgtcactcggatttgtaaacaccaccagatttgcaaacagtcggcttctccactggaaattgagaaacgagtcatggaggttttaccaccagaagagtggctagctgcacatcaatccatgatttattttggtcgtgcaatttgtcatcctaaaaatccaaaatgcgaccagtacccacaactttatcactttcctgataatttaaagtgattagaataaaagagagtaactggtgacgattatataagcgatacttaaaaacggtagaaaagctatcgtttttttcatttttctcataactaaacaataaataattcctaaccaagcacctatttgaataataaaaagcatttgatgaagaggtaaagataagccaattgtggctaaataaaggaaatctccacttccgatattaatatcaaccacttcagctaaaatcccaaataaacacaaaacaatagaaacttttgtaatcggtgtgagaattatcgttgaaatggtgaataatatccatagaaaaataggatactcttggtattttatatcataataacttaagataaaactcatgcataaagaaataaaatagatggtagacataatcataaaatcctttttatagtttatatttatattcgaaaaatggtagaaaagagattacgatttctattatagatagtcagtctaacgtcataatgacaattagcaagcggttgcggattttcttgaaaattgaatggttttctgttaaaattcatatatgaaagttttattcgatgtgcagaatcttttgaaaaaatttggtatttatgtttatattggtaaacgtctttatgatatcgaagttatgaagattgaattgcaacgtctctacgataatggtctgataagtagagatgattatttaaaagcagaactgattttaagaagagagcacagactagaattggagaaggaaaataaaaaatgagtaagaaattattgggaattgacctcggaggaacgaccattaaatttggtatcttgacgcttgagggagaagtacaagaaaaatgggcaattgagaccaatactttagaaaacggaagacatatcgtttctgatatcgttgaatctctcaaacatcgtttgagcctctatggattaacaaaagatgactttctcggtatcggtatgggttctccaggagctgttgatagaactagtaaaacagtaacaggtgcttttaatctaaattgggctgatactcaagaagtaggttcagttattgaaaaagaagttggaattccattttttattgataacgatgctaatgttgcagcacttggtgaacgctgggtaggtgctggtgccaataatcccgacgttgttttcgtaaccctcggaacaggagtaggtggaggtgttatcgcagatggtaacctcatccatggtgttgcaggagcaggtggagaaattgggcatatgattgttgatccagaaaatggatttacgtgcacatgtggtaacaaaggctgccttgagacagttgcatcagcgacaggtgttgttagagtagcacgtcaactcgcagaacaatatgagggttcgtctgccattaaagcagcgattgacaacggtgatactgttacaagtaaagatatttttatagcagcagaagatggggataaatttgctaattctgttgttgaacgtgtatcacgttaccttggactggcagcagctaatatttcaaatattttaaaccctgattctgtggttattggtggcggtgtctcagcagcaggtgaatttttacgtagtcgcgttgagaaatactttgtcacatttgctttcccacaagttaaaaagtcaactaaaattaagattgctgaactaggtaatgatgctggtattattggtgcagcaagcttagccaatcaacaagcaagttaaggagataaggtatggatatgtctgttattttaattattgttattcttctggcttttgttgcttgggcatcttggaattattggagggttcgtagggcagctaaatttttagataacgagtcttttcaaaaagaaatgtcacgaggacagttaattgatatccgagaagctggtgcttttcatagaaagcatattctcggagcacgtaacattccagcaagtcaatttaaagttgccttatcggctttgcgcaaagataaacctgtcctcttatatgacgcaagccgtggtcaatctattccaaggattgttttgttactcagaaaagaaggttttaatcaactttacgtgttaaaggacggtttcaattactggacgggtagagttaagtaatatactaaggagagagttactattaataactctcttcactttttgtagaaatgaattaaattgaaaaaagtagaaaataaatggcataaataatgaaatgatgaaaagttttcttatcacaaataggcagttaatatgaaaacatttacacttgtgtaaattctgttttttaagaaaaattgtgttataattcataagttaacagaattacattataaaatagaggaaaacatgacaaatttaagaacagatatccgtaacgttgcgatcattgcccacgttgaccacggtaaaacaactctcgttgatgaattattaaaacaatcacatactcttgatgagcgtaaagagcttgaagaacgtgcaatggattcaaatgatatcgaaaaagaacgtggtatcaccattcttgcaaaaaatacagccgtagcatacaacgatgttcgtatcaatattatggacacacctggtcacgcggactttggtggtgaagttgagcgtattatgaaaatggttgatggtgttgttttagtcgttgatgcctacgaaggaacaatgccacaaacacgttttgttttgaagaaagctcttgaacaaaacttaattccaatcgttgttgtaaataaaattgataagccgtcagctcgtccatcagaggttgttgatgaagttcttgaactatttattgagctcggtgctgatgatgatcaactagatttccctgttgtttatgcttcagctatcaatggaacatcttcaatgtcagatgatccttcagatcaagaaaaaacaatggcaccgatttttgatactatcattgatcacattccagccccagttgacaactcggaagaaccacttcaattccaagtttctcttcttgattacaatgattttgtaggacgtattggtattggacgtgttttccgcgggactgtcaaagttggagatcaagttactctttcaaaacttgatggtacaactaaaaacttccgcgtaacaaaactttttggtttctttggacttgaacgtaaagaaatccaagaggctaaagcgggtgatttaatcgctgtttctggtatggaagatatcttcgttggtgagacagtaactccgacagatgctattgaaccactaccagttttacgtattgacgagccaacacttcaaatgactttcttggtgaataattcaccatttgcaggtcgcgaaggtaaatggattacgtcacgtaaggttgaagaacgtcttttagcagaattacaaacagacgtttctttacgtgttgacccaacagattcgccagataaatggacggtttcagggcgtggagaattacatttatctatccttattgaaacaatgcgtcgtgagggatatgaacttcaagtatcacgtccagaagttatcatcaaagaaattgatggtgttcaatgcgagccgtttgagcgtgttcaaattgatactccagaagaatatcagggtgctattatccaaagtttgtcagagcgtaaaggtgatatgcttgatatgcagatggttggtaatggtcaaacgcgtttgattttcttgattcctgcacgtggtttgattggttattcaacagagtttctttcaatgacacgtggatatggtatcatgaatcatacttttgaccagtatctaccggttgttcaaggagaaattggtggtcgtcatcgtggtgccttggtttctattgaaaatggtaaagcaactacatattcaattatgcgtattgaagaacgtgggactatctttgtaaatccaggtatagaagtttatgaaggaatgattgttggtgagaattctcgtgataatgacctcggagtcaatattacaactgctaaacaaatgacaaatgtccgttcagcaactaaagatcaaactgcagtcatcaagacgcctcgtatccttactttagaagagtcacttgaatttttagcagatgatgagtacatggaagtaactcctgagtctattcgtcttcgtaaacaaattttaaataaagcagcacgtgacaaagctaataaaaagaaaaaatcagctgaataatatccaaagtatttcttatttatgattaataagaaaggagttctatgttttacttaattgttgcccttttgattgccttgtattacttttttatggcaccaaaaacagtacgtaatactttgaacgctattggtttagtaggtttggtagccttattacttgtcttggcagttatgagttttattaaaatccttcaattgccaggtgaattgtatattgggcttataatgattcctctaggatatacagcatttaaagaaacattgaatttgtcagaaaagaagaaatagcttatgaacttaggattttgtctcctaagttcttttgttttgagaaattagagacatatcctttaccttgaaaaagccactgattaaaggtaaaataatagggataataatgatagaatgggacgagtaatgaaaacaataacaacatttgaaaataaaaaagttttagtccttggtttagcacgatctggagaagctgctgcacgtttgttagctaagttaggagcaatagtgacagttaatgatggcaaaccatttgatgaaaatccaacagcacagtctttgttggaagagggtattaaagtggtttgtggtagtcatcctttagaattgttagatgaggatttttgttacatgattaaaaatccaggaataccttataacaatcctatggtcaaaaaagcattagaaaaacaaatccctgttttgactgaagtggaattagcatacttagtttcagaatctcagctaataggtattacaggctctaacgggaaaacgacaacgacaacgatgattgcagaagtcttaaatgctggaggtcagagaggtttgttagctgggaatatcggctttcctgctagtgaagttgttcaggctgcgaatgataaagatactctagttatggaattatcaagttttcagctaatgggagttaaggaatttcgtcctcatattgcagtaattactaatttaatgccaactcatttagattatcatgggtcttttgaagattatgttgctgcaaaatggaatatccaaaatcaaatgtcttcatctgattttttggtacttaattttaatcaaggtatttctaaagagttagctaaaactactaaagcaacaatcgttcctttctctactacggaaaaagttgatggtgcttacgtacaagacaagcaacttttctataaaggggagaatattatgtcagtagatgacattggtgtcccaggaagccataacgtagagaatgctctagcaactattgcggttgctaaactggctggtatcagtaatcaagttattagagaaactttaagcaattttggaggtgttaaacaccgcttgcaatcactcggtaaggttcatggtattagtttctataacgacagcaagtcaactaatatattggcaactcaaaaagcattatctggctttgataatactaaagttatcctaattgcaggaggtcttgatcgcggtaatgagtttgatgaattgataccagatatcactggacttaaacatatggttgttttaggggaatcggcatctcgagtaaaacgtgctgcacaaaaagcaggagtaacttatagcgatgctttagatgttagagatgcggtacataaagcttatgaggtggcacaacagggcgatgttatcttgctaagtcctgcaaatgcatcatgggacatgtataagaatttcgaagtccgtggtgatgaattcattgatactttcgaaagtcttagaggagagtaactatggggaaaaaaattgtttttacaggtggtggtacggtaggtcatgtaacactaaacctaatattaatccccaaatttatcaaagatggttgggaagtacattatattggtgataaaaatggcatagaacatgaacaaattaatcagtctggacttgatatcacatttcactctatagctactgggaaactacgtcgctatttttcatggcaaaatatgttagatgtctttaaagtaggggttggcgttcttcaatcgattgctattattgctaaacttagaccccaagccttattttcaaaagggggatttgtttcagtacctcctgtagtagctgcacgcctattaaaagttcctgtttttgttcatgaatcagatttatcaatggggttagcaaataagattgcttataaatttgcgactattatgtatacgacttttgaacaatctaaagatttaatcaaaactaagcatattggtgctgtaacaaaagtcatggattgtaaaaagtcgtttgaaaatactgacttaactagtataaaagaagccttcgatccaaacctaaagaccttactatttattggaggatcagcaggtgcaaaagtattcaatgattttattactcaaacacctgagctggaagaaaaatataatgttatcaatatttcaggcgattcttctctcaatcgattgaagaagaacctttatcgcgtggattatgttacagacctttatcagcctttaatgaatttagcagatgtggttgttacacgaggtggctctaatactatttttgaattagtagctatgaaaaaacttcatcttattatccctcttggacgtgaagcgagccgaggtgaccaattagagaatgctgcttattttgaagaaaagggctacgcattgcagttaccagaatctgaattaaacataaatacacttgagaaacagataaatttattaatttctaacagtgagagttacgaaaaaaacatgtcacaatcatctgaaataaaatctcaagatgaattttatcaattattaattgatgatatggcaaaagtaacaaaaggataaaacatgcctaagaagaaatcagataccccagaaaaagaagaagttgtcttaacggaatggcaaaagcgtaaccttgaatttttaaaaaaacgcaaagaagatgaagaagaacaaaaacgtattaacgaaaaattacgcttagataaaagaagtaaattaaatatttcttctcctgaagaacctcaaaatactactaaaattaagaagcttcattttccaaagatttcaagacctaagattgaaaagaaacagaaaaaagaaaaaatagtcaacagcttagccaaaactaatcgcattagaactgcacctatatttgtagtagcattcctagtcattttagtttccgttttcctactaactccttttagtaagcaaaaaacaataacagttagtggaaatcagcatacacctgatgatattttgatagagaaaacgaatattcaaaaaaacgattatttcttttctttaatttttaaacataaagctattgaacaacgtttagctgcagaagatgtatgggtaaaaacagctcagatgacttatcaatttcccaataagtttcatattcaagttcaagaaaataagattattgcatatgcacatacaaagcaaggatatcaacctgtcttggaaactggaaaaaaggctgatcctgtaaatagttcagagctaccaaagcacttcttaacaattaaccttgataaggaagatagtattaagctattaattaaagatttaaaggctttagaccctgatttaataagtgagattcaggtgataagtttagctgattctaaaacgacacctgacctcctgctgttagatatgcacgatggaaatagtattagaataccattatctaaatttaaagaaagacttcctttttacaaacaaattaagaagaaccttaaggaaccttctattgttgatatggaagtgggagtttacacaacaacaaataccattgaatcaacccctgttaaagcagaagatacaaaaaataaatcaactgataaaacacaaacacaaaatggtcaggttgcggaaaatagtcaaggacaaacaaataactcaaatactaatcaacaaggacaacagatagcaacagagcaggcacctaaccctcaaaatgttaattagcaataaaaaagactggatttatcagtcttttttatatatatcaagtcagtcatagattgctagtaaaaattgatttcttgaaaaaaatttaagtttgttataagttccgaatggtttaaataagttagaaatatttcaatttgatgttgcttaataaaaaaacgtaatttggtaacaattctgctttttttatggtataatattttctgaataattctgtttttggcagatgtagaatagaaaagaatggaaagatagcgaggtcgagtgaatggctagaaatggcttttttactggtttggatataggaacaagctcgattaaagttttagttgcagaatttattgcaaatgaaatgaatgtaattggggttagcaacgtccctagttccggtgtaaaagatggtataattattgatattgaggcagcagcaactgcaatcaaagaggcggtaaaacaagctgaggagaaagcaggcatcaccattgacaaaatcaatgttggattaccagcaaatcttctccaaattgaaccaactcaaggaatgattcctgttcctaatgaatcaaaagaaattaaggatgaagatgtcgaaagtgttgttaaatcagcattgactaaaagcattactcctgaaagagaagttatttcattgattccgcttgaattcattgtagatggtttccaagggattagagaccctagagggatgatggggattcgccttgagatgcgtggtcttatctatactggaccaacaactatccttcataatcttcgtaaaactgttgaacgagcaggtataaaagtagagcatgttgtgatcgcccctctagccttagcaaaatcagttctaaacgaaggtgaacgtgagtttggtgcaactgtgattgatatgggaggcggacaaacaacagtcgcttctatgcgtaatcaagaattgcaatatactaatatttattctgaaggtagcgattatgttaccaaagatatttctaaagtgctacgtacaacagtagaaatcgccgaagcattgaaattcaactttggacaagctaatgttgaagaagcaagtacttctgatacagttcaagttaatgttgttggtaacgaggaacctgttgaaattacagaaagctatctttcgcaaattatttcaggacgtattcgtcaaattttagaacatgtcaaacaagacttgggtagaggtcgtttacttgatttacctggtggtattattcttgttggaggtggtgcaattatgccaggagttgtcgaggttgctcaacaaatttttggaactagagttaaattgcacgttccaaaccaagtaggtattcgcaatccaatgtttgctaatgttattagtatcgttgattatgtaggaatgatgtcagaagttgacattatcgcacaacatgctgtaactggcgacgaaatgctaagacataaaccagtcgactttgattataaagaaaaaacaaatacaatgtcgacaatgccttattctgagccgttaacctcttctatggaagattctaatttagaaccaatccgagcaagagaaaacgctcaagagcctactgagcctaaagctaatattggtgagcgcatcagaggaatttttggaagtatgtttgactaaaacaataagtgaggaataaaaatggtattttcatttgatacagcatcagtacaaggtgcagttattaaagttattggtgttggaggcggtggcggtaacgctattaaccgcatgattgacgaaggtgtcgctggcgttgagtttattgcagcaaatactgatattcaagccttaagtagctcaaaagctgaaactgtcattcaacttggtccaaaattaactcgcggacttggtgcaggaggacaacctgaagttggtcgtaaagcagctgaagaaagtgaagaagttttaacagaagcacttactggcgctgatatggtatttatcacagcaggtatggggggcggatctggtacaggtgcggctccagttattgcacgtattgcaaagagtttaggagcacttacagtagcggtcatcacacgtccttttggctttgagggtaataaacgttctaacttcgctatcgaaggtattcaagaattaagagaacaagttgatacactgcttatcatttcaaataataatcttcttgaaattgtagataagaagacaccattgcttgaagctcttagtgaagcagataatgttttacgtcaaggtgttcaaggtattacggatttgattactaacccaggtttaattaaccttgactttgcagatgttaaaacagttatggcaaataaaggtaatgcactgatgggaattggtatcggttctggtgaggaacgtattactgaagctgctcgaaaagcaatttattcaccacttcttgaaacaacgattgatggagcagaagacgttattgtcaatgttaccggcggtatggatatgacacttactgaagcagaggaagcatcagagattgttagccaagcagcaggtaaaggtgtcaatatttggttaggtacttcaattgacatggatatgaaagacgaaatccgcgtaacagttgttgcaacaggtgtacgtaaagataaaactaatcaagtatctggttttacaacatcagctccaactaatcaagcaccttcagaacgtcaaagtacttcaaattcaaactttgatcgtcgtggcaactttgatatgacagagtctcgcgaaatgccaactcaacaaaatcagcctcatgcacaaaatcagcaacaaagttctgcttttggtaattgggaccttcgtcgtgataatatttcacgtccgacagaaggtgaacttgatagcaagttgtctatgtcaacgttttcagaaaatgatgatatggatgatgaacttgaaacacctccattctttaaaaaccgttaattaaaatgatgaatttacaagaaaataaaacagcgatttttgacaatgttagtaaattagcactaaaagcaggtcgcgctcatgaatcagttcatatcgtagctgtaacaaaatatgttaactgtcaaacaacagaagcgcttattagaacaggtgttaatcatatcggtgaaaatcgtgttgataaatttcttgaaaaatatcaagcattaaaagatgaaaagcttacatggcatctcattggtagtttacaacgtcgaaaagttaaagatgtcattaattatgttgattattttcatgctttagattctgttaagttagcagctgagattcaaaaacatgctcaaaaactaattaaatgttttctacaagttaatatatcacgagaagacagtaagcatggttttactattgagcaaatagatgatgcactgaacttaatttctcggtacgataaaattgaacttatcggcatcatgactatggctcccttaaaagcaactaaagaggaaatatcatcaatttttgaagagactgagagtcttaggaaaaggcttcaagctaggaacatagaacgaatgccgtttacagaattaagcatgggcatgagtagagattatgatattgctattcaaaatggatcaacatttgtaaggataggaacttcattctttaaataatggaggggaatatggcattaaaagatagatttgacaaaattatttcttattttgacactgacgatgtaagtgaaaatgaagtacacgaagtacaagagagaacttcagtgcaaagagattccagagcagctacagcacaggaagcttctcagcgtagtcatatgactaactccgcagaggaagagatgattggtagtcgtccgagaacttatacctatgatcctaatcgtcaggagagacaaagggtacagagagacaatgcttatcagcaagctactcctagggttcaaaataaagactcagttcgacaacagagagaacaagtaacaattgctctgaagtatccccgtaagtatgaggatgcacaagaaattgttgatttacttatcgttaatgaatgtgtcttgattgattttcaatatatgcttgatgcgcaagcacgacgttgcttggattatattgatggtgcaagtagagtattatatggttcattacaaaaggttgggagttcaatgtttctattaacaccagccaatgttatggttgatattgaggagatgaatattccaaagactggtcaagagacgagttttgattttgatatgaagagacgataaatatgatattagtactattaatattattaaaaacaattagggtctattcttatatcttactagcctatgccttgttatcttggtttccaggagcatacgattcatggattggtagactagtggtacagattgttgatccgattattcgcccactcagaagatttaatctacaatttttaggtctagattttacagtaatagtagcattctttttactaaatatgttgagtagatttttaatcttgctttttacataagatgacgttagatgatatttatcagcattttcgaccagaagagtatgcgtttatccataaaatagaccatttagctcaatatgtcgaaaacacctattcgtttattaccactgaatttctaaatcctagggaatttaaaatactcgaaagtgttctagagaggcgaggtagtcattattacacttctggtcagtattttcaaacagaatatgttaaagtaataatagcaccggaatactatcagttagatatggctgattttaaccttagcctaattgaaataaagtataatgctaaatttaatcaccttacccatgctaaaattatgggaactttactgaattacttaggtgtaaaacgatcaattttaggggatatcctagttgaagaaggctgtgctcaggttttggtcgatagtcaaatgacaaatcaccttgttcattcagttacaaaaattggaactgctagtgtacaattagctgaagttcccttgtccaaacttctaactcccaaacaagatattcaaaaactaactgttattgcttccagtttacgtcttgataaaattttagcaacgattttaaagatttcacgaacacagtcgacgaaattgattgaggcagataaagtcaaggtcaattatgcaaccgtcaatcgagtttctgaacaattagtagagggggatttgattagtgttagaggatatggtcgatttacgttgaaccataacctagggttaactaaaaatcaaaaatataagttagaagtagacaaaatgatacataactaaggagaaaacatgccacttacagcacttgaaattaaagataaaacattttcatcaaaatttcgcggttatagcgaagaagaagttaatgaatttttagagattgttgttgacgattacgaggacttgattagacgtaatcgtgagcaagagcaatacattaaagatttagaagagaaaatcgcttacttcaacgaaatgaaggaatcgttaagtcaatcagttattttagctcaagaaactgctgagcgtgtgaaaatttcagcacaggatgaagcatctaacctaatggggaaagctacatttgatgctcaacatttaattgatgaggctaaattaaaagcaaatcaaatccttcgagatgcgacagatgatgctaagcgtgttgctatagaaacagaagatttgaaacgtcaatcacgtgttttccaccaacgtttgctttctgagttagaagggcagctaaaattagctaactcatctgcttgggaagaattgttgaaaccaacagctatttatcttcaaaattctgatgcttctttcaaagaagttgttgaaaaagttcttgatgaagatgatgctttaccagtggtggatgacactgagtcatttgatgctactcgtcaattctcaccagatgaaatggaagaattacagcgtcgtgttgaagaaagtaacaaacaacttgaagagtcaggtttattagatactaataatttccaaatggaagaaccgatcaatttaggtgaaactcaaacttttaaattaaatattgaagattaagaaaaacaaggttttaatattatattatcagcgagtaggagatggtgagagccctacaatccctaatattgaaattatcattttcaatcattctacctgaactattatttaagtaaggtagaaggcttaacccaccttacgggttgttgagggagtaagaaatagctattttctgctctgaattaaggtggtaccacgagctttcgtcctttatgtgatgaaagcttttttatttagcaatttaaaaaattgtgataactattactataagataaggagttagtatgaaattaaaagaaaccttgaatttaggacaaacagcttttccaatgcgtgcagggcttccaaataaggaacctcaatggcaagaagcatgggatcaagctgacatttataaaaaacgtcaagcattgaatgaaggaaaaccagcctttcaccttcatgacggacctccctatgctaatgggaatattcatgtaggacatgcactaaataaaatttcgaaagacattattgtacgttcaaaatcaatgtcaggttttcgagctccttatgtgcctggttgggatactcatggactcccaattgagcaagtattagctaaaaaaggggttaaacgtaaagaaatggacttggctgaataccttgaaatgtgtcgtgattatgctctcagccaagttgacaaacaacgtgatgattttaaacgtctgggcgtttctgccgattgggaaaatccttatattacactaacaccagattatgaagcagatcaagtacgtgttttcggtgctatggcagataaaggatatatctatcgtggtgctaaaccagtgtattggtcatggtcatcagagtctgcccttgctgaggctgaaatcgaatatcatgatattgattcgacatcactctactatgccaataaagttaaagatggtaagggaattcttgatacagatacctatatcgtcgtttggacgacaacaccatttactgtaacagcttcacgcggtttaacagtaggaccagatatggagtatgttgtagttgtaccagtaggtagtgagcgtaaataccttcttgcagaggttcttgtagatagtctcgctgctaagtttggctgggaaaactttgaaattgtgactcatcacactggtaaagaacttaatcacattgttacagaacatccatgggatacagaagtagaagagttggttatccttggagaccatgttacaacagattctggtacaggtattgtccacacggctcctggttttggtgaagatgactataacgttggtattgctaatggacttgatgttgtagttaccgtagatagtcgtggtttgatgatggaaaatgctggtcctgattttgaaggtcaattctatgacaaagtaacaccacttgtaaaagaaaaattgggagatcttcttttagccagcgaagttatcaaccactcatatccatttgactggcgtacgaaaaagccaatcatttggcgtgcggttccacaatggtttgcctctgtttcgaaattccgtcaagaaatcctcgatgaaattgaaaagacaaatttccaacctgagtggggtaaaaaacgtctttataacatgatccgtgaccgtggcgactgggtaatctcacgtcaacgtgcttggggtgttccacttccaattttttatgcagaagatggtacagctatcatgacaaaagaagtgactgatcacgttgcagatttatttgctgaatacggctcaatcgtttggtggcaacgtgatgctaaggaccttctaccagcaggttatactcatccaggttcacctaatggtctctttgagaaagaaacagacatcatggatgtttggtttgattctggttcatcatggaatggggtaatgaatgctcgtgaaaacctttcctatccagcagatctttatcttgaaggttctgatcaataccgtggttggttcaactcatcactaattacatcagttgctgttaatggtcacgctccatacaaagcagtcttatctcaaggttttgtacttgatggtaaaggtgagaaaatgtctaaatctctaggaaatacaattcttcctagtgatgttgaaaaacaatttggtgcggaaatcttgcgtctgtgggtaacttctgttgactcaagtaatgatgttcgtatttcaatggatatcttaaaacaaacatcagaaacttatcgtaagatcaggaatacattgcgtttcttgattgcaaatacttccgattttaatcctaaacaagatgcagtagcctatgaaaatttaggtgccgttgatcgttatatgactattaaatttaatcaagttgtggatacaatcaacaaagcttatgctgcttatgattttatggcaatttataaagctgtcgttaacttcgtaacagttgatctatcagcattttaccttgattttgcaaaagatgtggtttacattgaagcggctaacagtccagaacgacgtcgtatgcaaactgttttctatgatattttagttaaacttacaaaacttttgactccgattctaccacatactgctgaagaaatttggtcatacctcgaacatgaggaggaggagtttgttcaattagcagaaatgcctgttgcacagacattctctggtcaagaagaaattcttgaagagtggtcagcattcatgacgttacgaacacaagctcaaaaagctctcgaagaagcacgtaacgctaaagttattggtaaatctctagaagcacatttaacaatttatgctagtcaagaagtgaaaacgttattaacagcgttaaatagcgatattgcactcttgatgattgtctcacaattaacaattgctgatgaagcagacaaaccagctgactcagtatcatttgaaggtgttgcatttactgttgaacacgctgaaggtgaagtctgcgaacgctcacgccgtattgatccaaccacaaagatgcgttcgtatggtgtagctgtttgtgatgctagtgcagcaattattgagcaatattatcctgaagcagtagctcaaggttttgaagcttaataaaaattatttaacgctatattttgacaaatatcttaccagttttaatggaagaaattggtaagacatttgtttagtagtcatcaaaaaagaagccttgattaggcttcttttaattatgctgttgttggatatgaaatttcaattaacttggcagtatggagtgatttcatctgctcttgaataataatagattgatctattttacgctttaagaagaactcacgaatagcttctaattcttcatctttgatagcacgatatttgtttgaaattaataattcataatgtttaggtgcttttgtaaaaacgacatcggtgttgccagctgaatagacttccactaattttgcatctgtattttggagttgatttcgaactagttcaggatgactactggttgtattaattagtctcataactattttccccctgattcttattaggtttattataacactatttaggaagaaaggtatgaattatttcctagaatggtgatttttttcccaagcttggacaccccatctatggcttcctcgttttagcttttctttagcttcttggataggaaaccaggctagatggttgaaatcttctagtggcgcttgatccttatgataggcagtaacttcataaatataggcgggattatagtagtaagtatcacggtgtctagagtaaaaatattcatcagcttgaccatagtaatggccaattgttgcggaataacctaattcttcaattaactcacgagttaaagcttctaggtgattttcattttcttcaatttccccacctggaagaaaccaagcaccattaggtgcctgtactaaaataattttatcatgagttggatttggaataatagcatagacaccaaatcgtgacctatagtttacattatctattttttcaccgaaagtaggattagtcatagttctctctcctgattgtgttttatgattttaaaagctttaattattttttatttattatactaaaatttttggaatatttccttaataattgtattaaaatttaaagacgaggtaggagagaaacagctttatagaggctattattttttgagaagagtgtgaaaaaaggttgagtttcttactcaaccttttgtactttcttcagtttttttagaagattttattatgatatttccattgctagtcataatagcacgaagttctttttcgcttggattctcaagatagtaatctgtgatagcatcttcaatatgttcttgaatggtacgacgtaatggacgtgctcccattttgggatcgtaacctaaatcaaccaatttttctttcactttatcagtgacatctagatgaataccattgatggcgagacgtgcattaacgtcagataacataatatcaacgatattgaggagattctctttatctaaagccttgaattcaataataccgtcaaagcggttcataaattcagggctgaagaagttacctagttgacctagtacggaattcgttctaccttctcgtgaggcaccaaagccaacgcttgcttcagttttaccagaaccagcatttgaggtcatgatgataatggtatctttaaaactaacagttcttccttgtccatctgttaatcgaccgtcatcaaggacctgcaagaacatatgcatgacatcaggatgagctttttcaatttcatctagaaggatgagcgagtaaggatttcgacgaaccttttcagttaattgtccagcttcctcgtatcccacgtatcctggaggcgctccgactaatttagcaacagcatgcttttccatgtactctgacatatcaaaacgaatcatactatcagctgaaccaaagagctcaattgctagttgtttagaaagttcagttttaccaacgccggttggtcctacaaataaaaaggaaccaataggacggtttgggctaccaagaccaactcgattacgacgaatagcttttgcaatcttaacgacagcgtcatcctggccgatcacatgttgtttcaagtcatctgcgagattaattaattgagattgttctttttcttttaaatcaccaacagggatattcgttttttcttcaatgatgtgctcaattgttttttcggtaataataggtgtatcttgatcgtcgaccttttgttgttgcatttctttatattttgcaatctggtcacggaagtaagctgcacgttcgtaatcttcttcacgagtcgcttgcgcttttaaattttctgcttcaatgagacgttgatcaatttcttttggatcaacaaaatttagtgttaggttcattttagaaccagcttcatctaataagtctattgctttatcaggtaaaaagcggtcctggatataacgattagatagtactgcagctgcttctatggcatcattattatattttacatgatgataatcttcgtattttttttggatacctttcaaaatagtaatggtttcttcaacagaaggctcatcgacttttacaggttgcatacggcgttctaaggcagcgtccttttcgataatacgatattcattgagagtagtagcacctactagttgtaattctccacgtgcaagggcaggttttaaaatattacctgcatccatactaccttcgccagctgtaccagctccaactatttcgtgaatttcatctatgaatagaataacatcttgacgttgacgaatttcttccatcaacttttgcatgcgttcttcaaattgaccacgaatgcccgttccttgtactagactcacaacatccaaacgaataacttgtttgccttgaagtttatgaggcacattaccatcaacaattttctgagcaagtccttcaacaacggcagttttcccaacgccgggttcgccaataagtacaggattattttttgtacgacgattaaggatttcgataacacgaataatttctgagtcacgtccaataacagggtcaatatcaccatggcgggctatttcagtgacattgataccaaattcttctagaatccctttggcttgagaaggagttgcagtttggttgcgattattatttcgtccattaccgtttcctccacctcggtttcctcctgattgtgtaggaggagtgtttggtaaatcttggccattaaaggctctgaaattatttaaatctccaaagaaatcatcaaagaaaggattgatgccaccaggcgcatgtgaaacatgatttaaacctgaaaaaagtggattattagggtcagttttaataatttggtagcaattttgacaaagatcaacttgcttttgttttccattaacatttgtatacaaatgaatagttgattcgtttagtttgcagttttgacagagcataggctacccctttcttatgacatttaactattgatgtgtatatagtcaaatatagtcaaactttatgcttttattatagcacctaaagcctagaaatcaagaaaaaagttctgtttttagcactgaatatattagagtgctaaattgaaaaatagatgactactgagaaaaatcgttatttgcggattttagacgataaaatcgttaaaaagttagtaaaaatgttgcttttcatgttgctttggtcacttttgtgttaaaatagaaaagactagaaaatatataggagtaagtaagatggaatcacatttagtgagaatcatcaatcgcctcgaattaatggcgactgatggtggtaatttaaaacgtaattttgaacgtgaaggtgttgttgtagcagaagtatcttttagtaatgaccctgaaaacggtcctgttttcacattacgtgatgtagaagcgcgtgaatcatattcatttgacagcattgaccttatcgcaatggaaatttacgatttattatactgataattataaaagaccttgaaggtcttttttttatatctaaatatacagtaaaatagaataaaaacaaaaatatttatctaaacttgtatttttattctttgtgtgatagactattggcaattacttttttaggagatgtcaatgaatttttcatttttaccacaatattggtcctattttaattatggtgtgatggtaaccattatgatttcaacatgtgttgttttttttggaactattataggtgtgttaattgctttagtaaagcgtactaatttacattttctcacaatattagctaatttctatgtatgggtatttcgtgggacaccgatggtagttcaaattatgattgctttcgcatggatgcattttaacaatttaccaacgattagctttggtgttttagatttagattttacacgacttttacctggtatcattatcatttccttaaatagtggtgcctatatttcggaaattgtacgtgcagggattgaggctgtaccatctggacaaatagaagcagcttactcgttggggattcgacctaaaaatacacttcgctatgttatcttaccccaagcttttaaaaatattttacctgctctagggaatgaatttattacaattattaaagatagtgctctccttcaaactattggtgtcatggaattatggaacggagcacaatcagttgtaacggctacttactcaccagttgcaccgttattatttgcagcattttactatttaatgttgacaacgattctctcagctttgttaaaacaaatggagaaatatcttgggaaaggggtaaaaatagatggttgagccaattatttcaatacaaggacttcataaaagttttgggaaaaatgaggttttaaaaggcattgacttggatattcatcaaggagaagtagtggttattattggcccttctggctctggtaagtcaacatttttaagaacaatgaatctcttggaagtaccaacaaagggaacagtgacttttgaagggattgatataacagacaaaaagaatgatatttttaaaatgcgcgaaaaaatgggcatggtttttcaacagttcaatctatttcccaatatgactgtactagaaaatattactttatcacctattaagacaaaggggctttctaatcttgatgctcagacaaaagcatatgagctacttgaaaaagttggactcaaagagaaggctaatacttatccagctagcttatctggaggacaacaacaacgaattgctattgcaagaggtcttgcaatgaatcctgatgtccttctttttgatgaacctacttcagctcttgatcctgaaatggtaggtgaagtcttgactgttatgcaagatttagctaaatctggtatgacgatggttattgtcactcatgaaatgggttttgcacgtgaagtagcggatcgtgtcatttttatggatgcaggaattattgttgagcaaggggcccctaaggaagtatttgagcagacaaaagaaatccgcacaagagatttcttaagtaaagtattataatttcattgtctaaaacaacttgttttagacttttattattccattgttatgagtaaattgttactgtattgtttggaagttggtaagtctatatataatgtagactaagaatgatagggtgatgaaaaaaatttagatgctttaaatatattaagtgtagttaatttataaaataagttgactttataaggttaatttgatactattcagttagctcctgaagaactaaaatctcttatcatggagctgatttttaccattttggtcttagaataggatgtctcatatgaattataaagagatttatcaagagtggttagaaaacgactcactcggtaaagatattaagtcagatttagaagctattaaaggcgatgaatctgaaattcaggatcgtttttacaaaacattagaatttggaacggcgggattgagaggtaaacttggagcaggaaccaatcgtatgaatacttatatggtggggaaagcagcacaagcattagctaatacgattattgatcatggccctgaagctattgcacgtggaattgcagttagttatgatgtccgttatcaatctaaggaatttgcagaattaacttgttccattatggcagcaaatggtattaagtcttatatttataaagggattcgcccaacaccaatgtgctcatatgctattcgtgctctaggatgtgtttcgggtgtgatgattactgctagtcataatcctcaagcttataatggttataaggcatattggaaagaaggatctcagattttagatgatattgctgatcaaattgccaatcatatggatgctataaccgattatcagcaaattaagcaaataccctttgaagaggctctggcaagtggttcggcaagttatatcgatgagagtattgaagaagcatataaaaaagaagtgcttggtttaactattaatgatactaatattgataagtcagtccgggtagtttatactcctttaaatggcgtaggaaatttacctgtgcgcgaagttttaagacgccgtggttttgaaaatgtttatgtggtacctgagcaggaaatgcccgatcctgattttacaacggttggctatccaaaccctgaagttcctaaagcatttgcctattcagaatctctaggaaagtcagttgatgcagatatcttacttgccacagatccagattgtgaccgagtagcattggaagtcaaagatagtaagggagaatatattttcttaaatggtaataagataggggcacttctttcctattatattttttcacaacgatgtgccttagggaatttgccacatcatcctgtattggtaaaatccattgtaactggtgatctatcaaaagttattgcagataaatataatattgaaactgttgaaactttaacaggatttaaaaatatttgtggaaaagctaatgaatatgatatctcaaaggataaaacttatctctttggctatgaagaaagtattggtttttgctatggcacttttgtacgtgataaagatgctgtgagtgcttcaatgatggtagtagaaatgactgcctattataaagaacgagggcaaacacttttagacgttttgcaaaccatttacgataaatttggctattacaacgagcgccaattttctcttgagttagagggtgctgaggggcaagaacgtattagtcgtattatggaggattttagacaggacccaatattacaagtaggtgagatgacattggagaattctattgatttcaaggatggttataaggattttccaaagcaaaattgtttaaaatattattttaatgagggttcatggtatgctttaaggccgtcagggacggaacctaagataaaatgttacctttatacgattggttgtacagaagcagatagtttatcgaaacttaatgcaattgagtcggcttgtcgtgctaaaatgaatagtactaaataagtcatatgtaaaaaggcgatgagggattcattgccttttctattgattaaaattgatacaaaatgaatagcgatataaaatagcataatcgctattttttgatataatatagaaaaaacggatgaagaaggagtatcaatgactgaattaatagatggtaaagccttatcacaaaaaatgcaggctgagttagggcgaaaagttgaaaggttaaaggaacagcatggtatcatacctggtttagctgtaatccttgttggggataatccagctagccaagtgtacgttcgaaataaagaacgctctgcattagaagctggttttaaaagtgagactctacgattatctgaatccatttctcaagaagaactgattgatattatccatcaatacaatgaagataaaagtatccatggtattttagttcaacttccgttaccacaacatattaacgataaaaaaattattttagcaatagatcctaagaaagatgttgatggtttccacccaatgaatacgggtcatctttggtcaggacgaccgatgatggtaccttgtacgccagctggtattatggagatgtttagagagtaccatgtggatttagagggaaaacatgctgttatcatcggaaggtccaatattgttggtaagccaatggcacaacttctccttgataaaaacgcaacagttactttgacacattcaagaactcgaaacctttctgaggtaacaaaggaggctgatatccttattgttgcgattggtcaggggcactttgttacaaaagacttcgttaaagaaggtgctgtggtgattgatgttggtatgaatcgcgatgaaaatggtaaattgattggagacgttgtatttgaacaagtggcagaagttgctagtatgataacacctgttcctgggggcgtaggacctatgacgattacaatgcttttggaacaaacttatcaagcagctcttagaagtgtgagtctatgattgttggtgaacaagaagcgagggcgttaattaagccacgccctaaatcaagccataaaggtgattatggtagtgttcttctgataggaggtttttatccctatggaggtgctattataatggcagctttggcctgtgtcaaaactggtgcaggattagttactgtagcaacccaaagttgcaatatcccctctttgcatagtcaactaccagaggtaatggcgtttgatagtgatgattacaaatggttggaaaaatcaattgttcaaagtgatgttattgtaattggtcctggattaggagtatcagaatcatctcgaaaaattttgaaccagaccatggagaagattcaatcacatcaaagtgtcatccttgacggatcagccttgactctgttatcagaaggtgcgtttccgcaaacaaaggctaaaaatttagtgttgacacctcatcaaaaagaatgggagcgattgtcaggtatcgctgtatcgcaacagacaaaagaaaatacccaaaccgctcttaaatcttttcccaaagggacgattttagtcgctaagagttcgcatacgcgtatttttcaagatttagacgaaaaagaaattatagtaggaggtccttaccaggcgactggagggatgggggatactttgtgtggtatgattgcaggtatgttagcgcaatttaaagaagcctctcctctagataaggtatcagtgggagtttatctacattcggcaattgctcaaggattatctaaagaagcctatgttgttctaccgacaacgattagtgatgagattccaaaagaaatggctagactatctaaataaaaaataagtagagaggtgttagcatgacacttcttttgctttatcgagctatttgtagagcaaataggtattttttaagtttttttggtataatgaagttaataaaactctcatgaggaggtgctatgtcagactatttatccgtgtcgacactgactaagtatttaaaattaaaatttgacaaagacccttatttagagagggtttatttaactgggcaagtgtctaattttcgtcgtcgcccaaaccatcaatatttctctttaaaagatgataaatcagtcattcaggcgacaatgtggtcaggtcacttcaaaaaattgggttttgaattagaggaagggatgaaggttaatgtagttggccgtgttcaactttatgaaccaagcggctcctactctattattgttgaaaaagcagaaccggatggtataggagctcttgctatccaatttgaacaactaaagaagaaactctctcaagcaggttattttgatgatcgtcataagcaattaattcctcaatttgttagaaaaataggagttgtgactagtccaagtggagccgttattcgggatattattacaacagtatctcgtcgatttccaggagtggaaatattacttttccccacaaaagttcaaggagagggcgcagctcaggaaatagcacaaactattgctttagctaacgagaaaaaggatttggatctattaattgttggccgtgggggaggttctattgaggacttatgggcatttaatgaagaatgtgttgtagaagctatttttgaatctcgtcttcccgttatttctagtgtcggacatgaaactgatacaactttagcagattttgtagccgatcgcagagcagcaactccaactgcagcagctgagcttgctacaccggttactaaaattgatatcttgtcttggattactgaacgtgaaaatagaatgtatcagtctagccttcgtcttatcaggacaaaagaggagaggttgcaaaaatcaaagcaatcagttatttttaggcaaccagagcgtctatatgatggtttccttcaaaaattagataacctaaatcagcagttaacatattctatgcgtgataaactacaaacagtaagacaaaagcaaggtttgcttcatcaaaaactgcaaggcatagatttaaaacagcgtattcatatttaccaagagcgtgttgtgcaaagtagacgactattatcaagtacaatgactagtcagtatgacagcaagctagcacgttttgaaaaggctcaagatgcgcttatatcattggatagttctagaattgtagcgcgtggttacgctattatcgaaaaaaaccatactttagtatctactactaatggaataaatgaaggagatcatttgcaagttaagatgcaagatggtcttttagaagttgaggtgaaggatgtcagacaagaaaacatttgaagaaaatttacaggaattagagacaattgtctcacgtttagaaacaggtgatgttgccttagaagatgccattgctgaatttcaaaaaggaatgcttatttcaaaagagttacaaagaactttaaaagaagctgaagagacgcttgtaaaagtgatgcaagctgacggaacggaagtagaaatggatacttgatggttactattgaaaaaattgatgaagctattcatcgttattacaaacagacacatagtgtcgtttctcctgatttgattaaggctatcctctactcagttgatggaggtgggaaacgtattcgtccacgcatccttttagaaattttagagggatttggagttgaactaatagatggtcattatgatgtggctgctgctttggagatgattcacaccggctcattaatccatgatgatttaccggcgatggataatgatgattttcgtcgtggccgcttaacaaaccataaaaagtttgatgaagctacagcggttttagctggagattccctttttttagacccatttgatttagttgtaaaagctggttttaaagctgatgttactgttaggttaatagagttattgtctatgtctgcgggtagttttggcatggttggtggacaaatgttagatatgaagggagaaaacaaagttttatctattgacgatttaagcttgattcatattaataaaacgggacgcctgttagcttatccctttgttgcagcaggtattttagctgagaagtcggaagaagtaaaaggaaaactgcatcaagctggccttttaatcggtcatgcttttcaagtacgtgatgatattttagatgtgactgctagttttgaagaattggggaagacaccaaataaagacattgtagcagaaaagacaacttatccaaatttattgggtttggataagtcacaggaaatacttgatgatactttgaaaaaagctcaggcaatttttcaaaatctagagaaaaaagctaactttaatgctagaaaaataatagatataatagagggattacggttgaatggctaaagagagggtagatgttcttgcctataaacagggactttttgatacacgagagcaagcgaaacgtggtgttatggcaggaatggtgattaacgttatcaatggagaacgttatgataaaccaggtgaaaaggttgcagacgatactgaattaaaactaaaaggtgaaaaactaaaatatgttagtagaggtggattgaaattagaaaaagctttacaagtttttgaaatttcagttgcagataagctaactatagatattggcgcctctacgggtggttttactgatgttatgctacaatcaggagcgcgtttagtttacgcagtagatgtaggaacaaatcaattagtttggaagttacgtcaggatcatcgtgttcgttctatggaacaatataattttaggtatgcccaaaaagaagatttcaaggagggactgcctgaatttgcatcgatagatgtctcatttatctctcttaatttgattttaccagctctaaaagaaattttagtggatggtggacaagtagtggcattaattaaaccacaatttgaagcaggtcgtgagcaaattggtaaaaatggtattgtcaaagacaagttggttcatgaaaaggttttgacaacagtgaccaatttcacgaaagattatggatatacggttaaacatcttgatttttcgcccattcaaggtggacatggaaatattgagtttttaatgcatttgcaaaagtgtcaagatccacaaaatcttgtgcttgaccaaatacaagatgttatagaaaaagcacataaggaatttaagaaaaatgaagaagagtgaacgtttaaatttaattaagcaaattgttcttaaccatgctgttgaaacacaacatgagttgttacgcagattggaagcttatggggtaactctaactcaagcaactatttcacgtgatatgaatgaaattggcattataaaagtgccatcagcaaaaggtcgctatatttacggtttgtcaaatgaaaacgaccctatctttacaactgctgtggcaaagcctattaaaacaagtattttatcaatatcagataagctactaggtttagagcaatttatcaatattaatgtcataccaggtaacagtcaattaattaaaaccttcataatgtcacattgtcaagaacatatttttagtttgacagctgacgataatagtctccttttgattgcaaaatcagaagcagatgctgatcacattcgtcaatcaatgattgcaatgttggagaaaaaagattagtagaggaccttatgcttttagaaatttctattaagaatttcgctattatcgaagaaatttcacttaattttgaaacaggaatgactgttttaactggtgagactggtgcagggaaatctatcattattgatgctatgaatatgatgttaggatcccgtgctagcgttgaagtgattcgccatggtgctaacaaagcagaaattgaaggatttttctctgttgaaaaaaatcaatcattagtccaattattggaagaaaatggcattgaattagcagatgaattaattattcgccgagaaatctttcaaaatgggcgcagcgttagtcgaattaatgggcaaatggtgaatttgtcaacactaaaagctgtggggcattatttggtagacatttatggtcagcatgaccaagaggaactaatgaaacctaacatgcacattctgatgttagatgaatttggtaatacagaatttaatgtcataaaagaacgttatcaaagtctttttgatgcttatcgtcagcttcgtaaacgcgtattggataagcaaaaaaatgaacaagagaataaatcacgtattgaaatgctagaatttcaaatagcagaaattgagtctgtagcccttaaatcagatgaagaccaaacgctactcaagcaacgtgataaattaatgaatcataagaatattgcagatactttgacaaatgcatatcttatgttagataacgaagagttttcaagtttatcgaatgttcgttctgcaatgaatgaccttatggctttagaagaatttgatcgagaatataaagatctttccaccaatctttcagaagcttactacgttattgaagaagttactaaacgtttaggtgacgttatcgatgatttagattttgacgctggtttactacaagaaattgaaaatagactagatgttattaacacaataacgcgaaaatatggcggtgatgtgaatgatgttttagactattttgataacattactaaagaatatagtctattgacaggtagtgaagagtcctcagatgctttagaaaaagaattaaagattttagaacacgatttgattgaatcagcaaatcaattaagtttagagcgccataagctagctaaacaattggaaaatgaaatcaaacaagaattaacagagctttatatggagaaagctgatttccaagttcaatttacaaaaggaaaatttaataaagaagggaacgaaatcgttgaattttatatttcaacgaatcccggagagggctttaagccattggtaaaagtggcttcaggaggagagttatctcgattgatgttagctattaaatctgctttttcacgtaaggaagataaaacttccattgtatttgatgaggtggatacaggagtttctggtcgcgtggcccaggctatcgctcaaaaaattcacaagattggtagtcatggacaagttttagcaatttctcatttagctcaggttattgcaatagcggattaccaatattttattgaaaaaatttccagtgactcttcaacagtttcaacggtaaggcttttaagctatgaagaacgtgtagaagaaatcgctaaaatgttggcaggaaacaatgtaacagacactgcacgtactcaagctaaagaattacttggtagttaactttggtaacgtctttaaaaagctaacattgttaggagaaattaatgttgatacacttaaattttgttataataagggtattgaaatattaaagtatagaataggataggatatgagtaaaatcaaaattgtaacggattcttccattaccattgaaccagaacttattaaagagcttgacattacagttgttcccttgtcagttatgatagatggtaccttgtattcagacaatgacttaaaagcacaaggggaattcttgaacctaatgcgtggaagtaaggaattgccaaaaacaagtcaaccacctgtaggtgtttttgcagaaatttatgaaaaattaatgaatgaaggtgtggaacatatcattgcaattcatttaacgcatacactatcaggaactattgaagcatcacgccagggagctaatattgctggtgcagatgttacagttattgattctacttttacagaccagtgtcaaaaattccaggttgtagaagctgcgaaattagctaaagagggagctgatttagataccatcttggctcgtgtggaagaagtacgccagaagtcagaattatttattggcgtatcgacccttgaaaatttagtaaaaggtggtcgtattggacgtgtaacgggtcttctaagttcattgcttaatataaaagtaattatggagctaacaaaccatgaattagtaccgattgttaaaggtcgcggtctaaagaccttcagcaaatggttagataattttgttgaaagtgcccaaacacgaaaaattgctgaaattggcatctcctactgtggtaaagctgatatggctaataactttagagaaaaactagctgttctaggtgctcctatatccgttttagaaactggctcaatcatccaaactcatactggtgaggatgcatttgctgttatggttcgttatgaataagaaaaaaatacttaccggactttctttttttctggtaagtcttcttttatcttttgggattttttccttgatcattccaaaatcaaatcctaaattaacaaaaaaagacttcctaacaaagaaagttatcccacttaactatgttgctcttggagattctctgaccgaaggtgtgggcgatacaacctctcaaggtggttttgttccactgctatcagaatcactccataatcgatactcttaccaagtgacttctgttaattatggtgtgtctgggaatactagtcaacaaattttaaaacgtatgacgacagatcctcaaatcgaaaaagatttagagaaagctgatttattgacgctaactgttggtggtaatgatgtcttggctgttattcgtaaagagctcagtcatttatcactaaattcctttgagaaaccagcagaagcatataaggaacgtttgaaagaaatccttgcaaaagcaagacaagataatcctaaattgcctatttatgttttaggcatttataatcctttttacctaaactttccacaattaactaaaatgcaaaccgttattgataattggaataaagctacaaaagaagtagttgatgcttcagaaaatgtttattttgtcccaattaatgaccgcctttataagggaataaatggtaaagagggtattacagagtcatcaaatagtcaggcaagtatcactaatgatgctctctttactggagaccattttcatcccaataatattggctatcaaatcatgtctaacgccgttatggagaaaataaatgaaacaagaaaaaactggccgtaatttaaatttctggaaatgggcatttctcttattgttggcaattaacctttccttcacagcagtgattgcaagtcgcttaattcaagtacgtgagcctaatacaggaaaaatttcgactggggtacaagataaagtaaaagtaggtacttttacgaccaataagtcgcaactgaataagacaattgcactttatttaaaacaatatcaaactaagaagatgaattataagatttatgctgcttcatcttctatactatttgaaggctcttatcaattattaggttatgaagtgcctttatacatctattttgaaccttatcgtttaacaaatggcgctgttcaacttaaagtgacctcattttcagtaggaactcttccgcttccagaaaaagatgtgttacaatatataaaatcatcttataaattgccaaactttgtagatataaaacctaaaaaatcggttattaatattaatttgcaagatttaaaaaataaagaaggtatttatttgaaagcgactgcaattgatttagtaaacgataattttagtttcgatatttttaagaaaaagccctaaaatgacgttaaatacttgaccttaagcctttttttagatatcatataatctgttaaaacttatgttgtataagtttagaatttatttggaggatttgttaacatggctaacaaacaagatttaattgcaaaagtagcagaagctacagaattaactaaaaaagattcagcagcagcagtagatgcagtttttgcagctgtagcagattaccttgctgaaggtgaaaaagtacaattaatcggttttggtaactttgaagttcgtgaacgtgcagctcgtaaaggtcgtaacccacaaactggtgcagaaatcgaaattgcagcatcaaaagttccagcatttaaagctggtaaagctcttaaagacgctgttaaataattcgtctagaaaaaccttgtcatatcaatgtttattgatagcgacaaggttcttttttatatccaatactcaataaatgactagagagattaaaggaatttagagtttcaaatgtgttagagcatacccttgaattatcttaactgtgatgttataattcctaaaagataagttaaaagagaggttgcgaaagagaatgtcagaaaaagctatactattaattatccttattgcttttgttattatcgctattataaagatagctctgttaaagttatatatgaatacgataaaacctaaagtagataatgaaggaaacatcataacaaagcctgtaaaggatgatttaacacccgaggaacgtgaagaacgtgaatttgataaagattggtaaaatcaatataaaagagcaaacaaggtttgctcttttattatttttaaaggtaattaagttgtcctcgaaaatcctccaatgattgatagcctttatcagccattatttcttttaattctctgcttacacgctgaaaaatttctggtccttctttttgtaaagcggttccgatttggaccatactagctccacatagaatgtgttcaaaggcatcacggccgtttttaacaccacctgttccgataattttaattgaaggatttaaacgtttgtagaaagcatggacgttagctaaggcggtaggcttgataaaatccccaccgatacctccaaagccatttttaggctttataacgacagtttcatcatcaataacaagtccatttccgatagaattaacacagttaataaaagctaaaggatatttgttaaaaattgtagctgcttgatcaaagtgaacgatatcaaagtaaggtggtaatttgatgcccaatggcttttgataatagctaaagatttctgaaaggatgaggtcagtcatttcaaaatcataagcaatttgaggttttccaggaacatttgggcacgataaatttaactctattaggccattgtaactactgttttcaacctttttaagaataatatgtgtctcttctggtgataaacctactaatgataaaacgtgatttttgctattgtcttgatcttgtaattcagtcacgaaatcaagataatagtcaatacctttattagggagtcccatagaattaattgatccccagtcagtatctgcataacgtggttgagggtttccctctctagcttcaagggtacctgtttttgtaacaaaggaaccagcttcagaattttcaatagctaataactcttccttagtcatacaataaatacccgctgcattcatcaaacaattgtcaaaactaaaaccagcaatttccgtttttagcgataccataatatcctcctgaagataaatttttactattttatcacttgattaatagagctgcaagaaaataatgataatggtaataaaatttcgctaaataacgaacattattgtttgtataaacaataatagtaaagaaataaatgatgctttctataatgcataaaaaataagcttatgtaagcttattttttatgttcggcgtaagattttctttagtaattgaatactcttatattttaatggatttggatagtagcggaaagtacccattttacgaacaatgtaaccattaaaattctgtttaaagcgaagtacgccatctgaaccatcaaaatttccttgaatacctaaaaaattatagaaagttgattgacgctttaaagcctcttgcataacatattcttgaagaactgcaggcgcataaaatttattaaattctgtgtatgagccagagaaaagatagacagtttctttcgggctataaataaagaggctaccagctaaaacaacatcttgatttccaaatttttgaataaaaggttcgacttctttgcgacgtttatctaaactagctagttgattgacaagctcagtacgttgacgatggtatttggcagaatctgtattattttgatggcgattatcaaggactgtaatctgttcttccaatttctttgcatttaattgtaggttatgatcatattccctaaagtttagagttgcaatgacaaattccgccttatctccgaaactatcataaaaatcttgataataatctagagatttatccatatagtcccggcgatcagaagtagaagaagtaatatccttaaagatatgtagttcttcccgcttgaggacacgtatttttataccaaaagacatggcttttttaaccaaggggcgtccttttttagagaaagatttaagaagattttgaggagtgataccttctagatttttaacataatgccaatcaggttcaccgccaggataaccaatatgaagcccatcgtggtgataacctatactagtcaggtcatcaataagataggtgttcggtgcacctttaggcttaccttcaccagtaaactcttggtaggtatcataaggtttaattaataattctaaagcgccctgagatttggcatagttctgtagttctttataaaaatgtttcagatatttagaattggaatgggctggaccagaattgacttccatatgaagtccaccagtcattgggatggtataaacaatactgatgatttccattttcccatcgatttggtagcccatgtaggtaatgtcatacccacgtttttttagaagctttgccatctcaggggtttgcataaacgattgtaaatcgtaatttcctgaataactttcgaactctttagctgttaattctttaagcgccataaaagtatcctttcctaactagctattacgttttttgcgtaaggcatagacataattagaggctttataaagcaatctgttcactggaatgttaaattctccaataaattcctcaatgattggttcgaacttagacttaaaatgatataaaccaccagataagtcattctcaatcccccccatattttgccaaatatttccacgttcaaaagccctttgagctgtttcaaaccaagtgtaaataggagcagaataagatttaaagtaatcgtccataccagcataaatattttctgatgtattaccaaattctagagtgagggttgcagccaatggaataatgtctcggtcataggctttttgagcttctttgagaaaatcaatttctttatttaatcgatcaatcgtaccttggtgttgtttaacttttttctcacgattaagttcaagtgattttattctttcagattgggctatctgacattctttttctattttttctaatcgttttgcaacatctagcgaagccattgtgatgtatgagttattaggatacgtatcaaggagtttttggtagtagtcaattcctctaagatttatccctttacggtcttccgtttttttcatcaactctgcaaaatcttcaagtagttcatggctaccaaattgtatatctactcccttatttttggaagttcgaatagcttgacgagtttttttagacattttatcaagtccaaattgattagcatataggtttgcctgaaaacgtggttggatagtatgagctaaatctgttgtccgaccagtccaatcagcacctgcacgctgtaaatgatcaatggcgattaacccttctttttcatcgggcgaattttcaaaatctttggcattgaccatttttaaatagatgagaggatcacacttgataaagagagctctttgttttttgccaaaagctttaaggtccttaaggaccttagttacaatatctagattggagtaatccatgattggtccacgcggaatatatagcatggagaagccaagaggaagtgatttgatgagaatactagcgctggcaatttgggtttcaccgtcaaaaaagccaagtaattgactaccccagttgtcttttactttgggccaattagaagattgaagtaggtttgtttggttggattcgctcacaaagcgatcgtgttcgacagcggtaatttctctatacatgagtttcctttcttagtgagagtgtctttgtttttttcgaatagtataggctaggttggccaatttatataataatggattgattgctagattaaactcgccaatatattcttcaaacattggattgaagttacttttaaattttgttaaaccatcgttaagacttccctcgacaccgcctagattagcagatacaatatcgtttttgaaagcatcttcgaacaccctagcattcaagagatactgtggataaaatttacggaagctatcatccataccagcatacaacatctccaggacattgccaaaacgaatggacaaaattcctgcaatgacaggctcatctggatatttcttgctaaactcctgaaattcaaggatatattgtttaacagaagcttcttgttgatttagccttgtcaggcgacttttttgatgggatggagtttctgataaatctttttggatttgaagaagttgttctttaaattgcgctaatcttttaggaagattgactttagctaaatagagataggcatcttctccataaattgtcattagttgatggaaatagttttcattacgtaaagctacacctttacgattctcggttaatgctacaaccgtggcgaatttaggtaaatcatcaatgttggcacgataaatttgaacaccgcgatgctttgcatcttttatcagacgtttagtgtgttttggaaagttttcttctatatttgctttggtatagatattcgcttgaaaacgaggttggatggtttcggaaatggctttcgttggacctatccattgggcacctgctgacttaagattatcaattgcctgtctactttcatctatctcttcggcgacattctcttctttaaggtgatattgacgtagaagaagtgctggatcgaattttgcaaaaacagcacgtttctttcgtccaaagttttttagtgtttttaacacaaagttaactaattctttattgctgtagtccataataggtccacgtggaatataaagcattgtaaaaccaagtggtaatgatttaattaagatgctagctacagcaactaattggtcatctttataaaagcctaaacgttcattttgccaatttgattttacttgtgcccactttgaagagtggaggagattggtttgagacgatgcaatagcaaaggcatcatattctttttcggatattccaacggtaacatgatacatcagtttattacccattcacgtagtgcgtaggctacgccactttcctcgtttgatttggtgatatattttgctattttttttagttcaggattgccgttttgcataacaacaggatttccaacaacttcaagcatagcacggtcattttcttcatcaccaatagccattgtttgatctacagttaatcccattttctctgcaaggtggagaagtgcagtgcctttattaacgtttttgggtaaaatttctaaataaaaaggagttgattttacaatagtgtagttatcgagaactttttttggaattttagcaattgctgcatctaagatgtcaggttgatcaatcatcattagtttaatgatttctttgtctcccatttcttcaggagtacgatagaagagcggcatattaactaaagttacttcgtgtattgtatatttaccaatatcacgatttgctgtgtaaattccttcttttgtaatggcgtgcatgtggacgcctaatttacgcgctaacagttcgaaatccagatagtcttcataggttaaggtttctttgatgatgtcatctcctgtggctgtgtcttgaactagaccgccgttaaaggtgataacataatctccctcttcattgagtttcaattcttctaaaagatcttggactccgatgattggacgtcctgtagcaataacaattttaacgccttttgattttgcttcttgaacagctttagccacttcaggtgtaatttcacgcttactatttaatagggtgccgtcaatatctacggcaacaagtttaattgaagtcattttatctcccactctttattcaatatcctaaaatactcaccttatatcttactaaaaaataaagggtttgtcatgaatggctattatctttcgtgagtgtcaaatgctcatttgtgatataagattgaaattcttcttttgtacttgaaaataggctatctaatgtcaacatttcttttggaaaataaaaacgttgatcaccataattagatccagttaatgcttttacaatcggtgataagcttgataattcagcaagttgtccattcttttggataatttgaatttctgttcgtggatttgaatgttcaggccgataaacatcgtaaggtaagtcaaaattagcatggacaccagtgtaataatcgggatcaaaaccaacctgtgagactagttctttcattttaactagattttctttatcagactcttcaaaggtaattgatttaaagacttttcgattgataaaacgattagctaaatctgccaaaatgttatcatcagcttgcatccaagattggaagtaagtattcattaccccatcatctagggctaaataatcttgtaaatcatattgatccgtgaagaaaggaataagatttggagaagtttgttcaaaaaaatcgcgatgggtatcaaataagaagcgagcacgttttagtaaattttgtaagagtaattccatagcacgactggctggatggaaataaacttgcatatacatttggaagcgactaacaatataatcttccacagcgtgcatcccgttacgagcaaaagcaattccagaatcggttggtctaataacgcgtaaaattcgtgttaaatcaaattgtccatagctagcagcagtgtagtaagaatctctgagaagatagtccattcgatcacaatcaatttgactagaaattaattgaacaacttgtttattggggtagctatgattaataacactagctactttatcaggaaaatcaggagccacctttcgtaaaatagcattaatctctgtggtaggattggtgatgatttcctgagtgtaagcttcatgatcagtattgaagagacgctcaaatgtatgagaatatgcgccatgtccgatatcatgtagtagggcggcagccatcgttagcagggactcatttttattccaaagatcagaataatgttcatcaaagatttctgtaactttacgagccagttcataaactccgagacaatgtgaaaaacgactatgctctgcaccatggaaggtaaaagaagtcgttgaggtttgtttaatgcgtcgtaaacgttgaaattctttagtgttaatcaagtcatatatgacttgattatttacatggatataagtgtgaacggggtcacgaaatactttttcattcatatatatattatagcaaaaattgaaacttgagtcagaaattggtagaatagaaggataaaagaagtgagagaagtcatgaaactagaaattaacaataacattcaaattgacaacgaaaccgaaatgattcatgagattcacgattgtcaatttattgaaaaaggaagttacgtttatttgaattatattaatgctgagggcgagagggtagttattaaggcaaatcatgaggaattgcttatgacgaggttttcaaatcctaagtctgtaatgcgttttcatcgtgaaacgcctgctttggttaatatccccactccacttggtgttcaacatttgattacagagacaagtcactatcagtttgatttgtcacagcaaaggttgcatatcaattatgtccttaagcaaacggagacaggagactgttttgcaaattatgaattaaggattcaatggtattaagataactaccattaacaaaagagtagtcgttatgaatttcgtttactgaagacgctgggatctctttatgagagccatttatttgataaactgcagtgtggtttatttcgactagatgaacttcgttttttcccttgagattattagtgatagcaaggataattaattgaaaaatggatttttttctgttacaatgattaacatatcaagggagtagcagacggtttaccgtggcaatgtcgtcattacgaaagaaatttccggcgttgtcttaaacagcgagacttgttttcataaaaacaggtctctttttgtttgtggagagaccaaaggaggaaaggttttgttaaaagaacagaaaaaatccttgttttacacacaaggtcaagaagaggttctaacgtctttagaatcttctcgtgaaggattatcaacgacagaagcgaaaaatcgcttagagatgtatggtcgcaatgagcttgaagaagggaaaaaacgtagtctaatagctaagttttttgaccaattcaaagatttaatgattattatcttactggttgctgcagctctctctgttattacggaaggtatgcatggcttaacggatgcattgattatcttggcggttgttatcttaaatgcagcttttggtgtttatcaagaggggcaagccgaagcagctattgaagccctcaaagatatgtcaagcccaattgcgcgtgttcgtcgtgatggtcatactattgaggtggattctaaagaactagttcctggtgacctcgttatgttagaagcaggagatgttgttcccgcagatttacgacttttagaagccgcgtctctaaaaattgaagaagcagctctaactggtgagtcagtacctgttgagaaagacatatctcaagtagtagcagaggatgcaggtattggtgaccgtgtgaatatggcgtatcaaaattcaaatgtcacgtatggtcgaggatatggtgttgttactaacacagggatgtatactgaagttggtaaaattgcggacatgttggcaaatgctgatgaatctgaaacaccattgaaacaaagtttagttcaactttctaaattattgacttacttaatcgtgattattgcggttattactttcttagtggggatatttgtccgtaaagaaggttggattgaaggattgatgacttcagttgctttagcagttgcagctattccagaagggcttcctgcaattgttacgattgtcttatcaatgggaacaaaaactcttgctaaacgcaattctatcgttcgtaaactccctgcagttgaaactttaggttctacagaaatcattgcatcagataagactggaactctgacaatgaatcaaatgactgtcgaaaaagtgtatactaatggtgttctccaatcatcttcggaagaaatttcagttgataataacactttacgtattatgaatttctccaacgatactaagattgatccttcaggaaaattaattggtgacccaacagagactgcactggtacaatttggtttagataagaattttgatgtccgtgaagttttgaaaaatgaaccacgtgtagctgagttaccatttgattcagatcgtaagttaatgtctacgattcataaagaatcagatggtcgctactttatcgcagtcaagggtgctcctgatcaattattaaaacgagttactaaaattgaagataatggcttggttcgtgatatcacggctgaagataaagaggctatcctaaataccaataaagaactcgcaaaacaagctcttcgtgtcttgatgatggcttataaatatgaaacacaaattccaagtttagagactgatattgttgagtcagatttagtattctcaggtttagtgggaatgattgaccctgagcgtccagaagcggcagaagctgttcgagttgctaaagaagcaggaattcgtccgattatgattaccggggaccatcaagatactgcagaagctattgcaaagcgtctaggtattattgatgcaaatgacacagaagatcatgtctttacgggtgctgaacttaatgaattaagtgatgaagagtttcaaaaagtatttaaacaatattctgtctatgcacgtgtttctcctgaacataaagtgcgtatcgtgaaagcttggcaaaacgatggcaaagtcgttgccatgactggtgatggtgttaatgatgctccatcgctaaaaacagcagatattggtattggtatgggaataactggtacggaagtttccaaaggtgcttctgatatggtccttgctgatgataattttgcaactattattgtggctgttgaggaaggacgtaaagtcttctcaaatatccaaaaatctattcagtatcttctttcagccaacatggcagaggtatttacaattttctttgcaactttattaggatgggatgtacttgcaccggttcaccttctttggattaacttggtaacagatactcttccagccatcgctcttggagttgagccagctgaaccaggagttatgacacataaacctcgtggtcgccagtcaaacttctttgatggtggtgttatgggagctattatctatcaaggtattttacaaactatcttagtacttggtgtctatggttgggcattgatgtatccagaacatgctggttatcgcatgattcacgcagatgcccttacgatggcctttgcaacgcttggtttaatccaattggtacatgcatttaacgttaagtcagtttaccaatcaatctttacagttggagcttttaaaaatagaacctttaactggtctattccagtagctttcattcttttgatggtgactattgttgttcctggatttaataaacttttccatgtaactcatttaagttcaacacaatggttaactgtagttatcggaagtttattgatggtagtgttaacggaaattgttaaatttatccaacgtaaattaggacaagacgaaaaagctatttagtttagctgataaaaaaactcacttagaatatctaagtgagttttttagcaatcaaatattgtcatagagttgcgtaattcgtcttcaaaatatttttttcgatagttttcaaaactatccaaatgcttaacggcattataccttttgctaagattccaggttaaattagggttatgattgggattctgattgacaaagtcaatagttaaattccattctctaatatatccaagtggtctagaatgataagtagtctctccaattttaacgtcgccaaatgagcggtgtgcatgaccaaaaacaacatctttgatatgatatttttggaataaatcatgataagcctgactccccaaaaaagcattaaaaggagagaatctaggatgagtcatcgtgaattgtttatggggaacaaagtgcatagcaataatgatatttgaagaatcgacttttgctaatatttcgtctaagcgttttaaaattgatgcttggatagttacatcattatttggacgttttaaacgtctatcaaaccaaaaagtcttttttaatttttcaacatccttgatgtctctattatttgaaaagctgtaatcataccagccatgaaaagctagtagcatttttttgtcaaatcgataggtttgaaagtcaagacgttggatttctgtttctgttaaatcaagcatatcatggtttcctaaattatagctaagtttaatatgcttttttaagttattgataaagggaagtgtatctttagtaaaatgattagatatatctccagcgatatggaggtgatcaattttttctttcttaagcaaattaattaacgttttcgtctcaaaggtagaaaaatgattgaggtcaatatgtaaatcactcatgatagcaagtttggtcataagggtattgtaccatattgtagttcaaagagttaaacagtaaatttttgaaatagttttagagtcattctataatagatatgtcattgtagaatgcgctttcataagtgtgtttagaagttttatatttaaggtgccttaaggaggtctcatgtctaatttttataagctcttgaaagaaaaatttcctcgaaaagaagatatcgtaacagaaatgatcaatttagaagctatttgtcaattacccaaagggacggagtattttattagtgatttacacggggaatacgatgctgttgattatctcttacggacaggtgcagggtctattagagctaaattattagactgttttgattggcagaaaatagttgctgttgatttagatgatttttgtatactgctttattacccaaaggaaaaattagccttcgataaaatgaacttgtcagcaagtgcttataaaacgaagttatgggaaatgattccgttacaaatacaagttttaaaatatttttctagtaaatatacaaaatctaaagtacgtaagcaattgtcaggtaagtttgcttacattatcgaagaacttttagctgagattgaccgtaacccagagaagaaaagctattttgatactattattgaaaaattatttgaattagaccaagtagaagatttaattatagtattgtcccaaacaattcaagttttgattattgaccatttacatgttgtaggggatatttacgatcgtggtaggtatcctgatcgtatcttgaataggttaatggcttttccaaatttggatatccaatgggggaaccatgatgtcacttggatgggagcagcatctggttcttacctttgtatggtaaatgttatccgtattgctgcacgttataataatattactttaattgaagaccgatatggtatcaatttgcgtcgcttggttgattactcacgccgttactatgaacctctaccttctttcgttcctatattagatggagaggaaatgactcatccagatgaactagacttgttaaatatgatacaacaagcaacagcaattttacagtttaaattggaagcccaattgattgacaggcgtccagaatttcaaatgcataatcggcaacttattaaccaggtaaattataaagatttaagtatatctattaaggaagttgtgcatcaacttaaagattttaatagtagatgcattgattcgaaaaatcccagtcgattaacaagtgaggaagaagagcttttacaacaattgatgatagccttccagacttctgaaagtttaaagaaacatattgatttcctatttgaaaaaggaagtatgtatttaacatataatgataatcttttattccatggttgcataccaatgcatagtaatggtgattttaaaagctttaaaattgcaggaaaaacttatggtggtagggatttactggatttatttgaaagtcaaatacgtctagcatatgctagaccagagaaacatgatgatttggcgacagatatcatttggtatctttggtgtggtgaaaattcttctctttttggtaagaatgccatgactacttttgagcgctattatgtttccgacaaagtaactcatcaagaaagaaaaaatccctactttaaactgagagataaagatgatatttgcactgctcttttacaagagtttgatttgcctaagtttgggcatattgtcaatggtcatacgccagtcaaagaaaaaaatggtgagcaaccgataaaagcaaatggtaagatgttagtaattgatggtggctttgccaaaggttatcagaaaaatacaggtttagctggctacactttgatttataatagctatgggatacaattaatttcacaccttccttttacatccattgaggaagttttaagtggaaccaactatatcattgatacgaagcgattagtagaagaagccaaggataggattcttgtaaaagatacaactattggacaaaagttaaccaaagagattaaagacttagatcacctttatcgtcattttcaggaatatgatgactagtgtttaagtaatttactaattgatatgtaggatttaatttttcagtttcttaccttgtctcttttattaaattgacttaaaataatattatggacataaaggcagaaattcaaaaattagcaaaagaaattggtatctctaaaattggttttacgacggcagataactttgattatttggaaaagtcattgcgtgcttctgtggaagaggggcgcaattcaggatttgaacataaagtcatagaggatcgtatctaccctgaaaggcttttagaatcggctaaaacgattatttcaattggcgttgcttatcctcacaaacttcctcagcaacctcaaaaaacatcttataaacgaggaaaaattacacctaattcgtgggggcttgattatcattatgtggtcggcgaaaagttagacagactatcaaaaggcattgaagagctctgtcgagattttcctttgcaacaaaaagcaatggtcgatactggagctttagttgatactgcagttgcccaaagagcaggtattggttttataggaaaaaatggtctagttatttctaaagaatatggctcttatatgtttttgggagaattaattaccaatttagagatcgagccagacaagcctgtcgattatgattgtggtgactgtcgtcgttgtctagatgcctgtccaacttcttgtttaattggtgatggctcaatgaatgccaagcgttgtctatcatttcaaacccaagataagggaatgatggacatagagtttcgaaaaaagattaaaacagttatctatggttgtgatatttgccaaatttgctgtccttataacaaaggtataaataatccattggcgacagagattgatcctgagttggctcaaccagaattaataccatttttgagtttatcaaatggacaatttaaagaaaaatttggtatgattgctggaagttggcgaggtaaaaatattttacagcgtaatgccattattgcgctagcaaatgctcatgataaaaccgcagtggtcaaattaatagagattattgataaaaataataaccctattcatactgcaacagctatatgggcattgggagaaattgtcaaaaaaccaaacgatgagatactggagtttatgagtaatttaaccttaaaagatgaagatagccgaaaagagttggaattaatccgtcataaatggcaattttaagccttttatggtatttttaagaaccttatgataaaataaaacagattaacaaagattggagaaatctcatggaagtggctgaaattcgccaaaaaatagtagaaaataaagagaagttgactagcttcaggaggtctctttgacttagatcgtttggaagaggagattgctcttcttgaaaatcaaatgactgagccagacttttggaatgacaatattgcagcgcaaaagacatctcaagaactgaatgagttaaaaggtaagtatgatactttccataatatgcaagaattatctgacgaaacagaactcttacttgagatgcttgacgaagatgattctttgaaagaagaattagaagaaaatctaatgcagctagataagataatgggtgcttatgaaatgacgcttctcttatctgagccttatgaccacaataatgctatcttagaaatccatcctggttcaggaggaactgaagcgcaagattggggagatttactcttacgaatgtatacccgttttggcaatgctaatggtttcaaagtagaagtattagattatcaagcaggggatgaagctggtattaaatcggttaccctctcttttgaaggccccaatgcttatggtttgttgaaatcagaaatgggagttcatcgcctcgttcgtatatcaccttttgattcggctaaacgtcgtcatacctcatttgcttcagttgaagtgatgccagagttagatgatacgattgaagtagaagtacgtgatgatgacattaaaatggatactttccgttccggaggagctggtggtcagaacgtcaataaagtatcaacaggtgttcgtttgacgcatattccaactggaattgtggtatcgtctaccgttgaccgtactcaatatgggaaccgcgatcgcgctatgaagatgttgcaggctaagctatatcagttagaacaagaaaagaaagcacaagaagtagatgctcttaagggtgataaaaaagaaatcacttggggaagtcagattcgttcttatgttttcaccccttatacgatggtgaaggatcatcgtactaactttgagcttgctcaggtagataaggttatggatggagaaatcaatggctttattgatgcctaccttaagtggcgcattgaagactaaaaataatgaaggagaaacatggcactaatagaaatgtctggtgttactaaaaagtatcgccgttcaacaactgccttgagaaacttaaatttatcaattcagcaaggtgagtttgtgtatttagttggtccgtcaggtgctggtaaatctagcttgattcgcctcctataccgtgaagaaaaattaagttcaggtagattaaaggtaggggaattcaatctcaataaactcaaacgtcgtcaaattcctattttacgtcgtagtattggagttgtcttccaagattataaattactaccaacaaaaacagtttatgagaatgttgcgtttgcgatgcaagttattggagctaagcgccgtcatattaaaaaacgcgtgccagaagttctagaattagtaggtttaaaacacaagatgcgttcttttccaacacagttatctggtggagaacaacaacgtgtggcaattgcacgtgcgattgttaataatccaaaattattaattgcagatgaacctactggtaatttggatccagaaattgcttgggaaatcatgcatctattggaacgtattaaccttcaaggaacgactgttttgatggcaacacacaatagtcaaattgttaacacacttcgtcatcgtgtcattgagattgaagcaggtagcgttatccgagatgaagagaagggagaatatggttatcatgattaatttctttagacatttctgggaatcgcttaaaaacttgaaacgtaacttttggatgacttttgcttctgtaacatcagttaccataaccttacttcttgtaggcttgttttcatcagttttactgaatgttgaaaagttaacaactgatgtttcaggtaattttactatcagtgcctttttaaatgttgactcaacggatgctcaaaaacaagtcaaagataaggacggaaagctaaaagataatcctgattatcataaagtttacgacaaaattaaacgtatttctggtgtagagaaagtcacttattcaagtaaagctgaacaattaaaagaagttcaaaaagagtatggttcagatgttattgatgatacctataaagatgctttgttagatgtttacgtagttgggacaagttctgcaaaagtttctaagagtgtcagtgaagcaattggacgcattgaaggtgttgattatactaaagaacctattgattcaacaaaactatctaatctcacagataacatccgtatatggggatttggtggtgttgccttattaattgtccttgctatctttttgatttcaaatactattcgtatgtcgattatgtcacgccgtacagatattgaaatcatgagattagttggcgctaaaaattcttatattcgaggaccgttcttttttgaaggtgcttgggtagggattttaggggctatcgttccatcgctgattttctattttggttatcaatttgtgtttaacaagtttaatccaaaatttgagacaagccatgtttcattgtatcctatggatattatggttccagcaattattggtggtatggtgattattggtattattattggctcacttgggtctgtcctatcaatgagacgttaccttaagatttaataaaaagagatgaaatctatttcatctctttttattaattgtagatatcatgttagtggataaaattcgaaataaacgtagccaattgtttttcagatgatttgtgagaaagggtagctttaccatcccctttttgatgtccgtagttaccaaatcggctatggtttcctccgacaatagttcgaaaagtacttgaatttgggaggcgttttttagcttcctcatatttttcccagtttaaaatatgatcattacttgctgtaatggagagtactcttaaatttttatgagataggtcggatttacgtgaagggtaggaagctaataatatgagccctctaacaggggctactttggcattttggctagcaacaactcctcctaaagaatgtccagcaaggtaaacattagttaagtggttctgattaataattgttttagctttatgaggcgataaaactggcaaatttaaaggtgtcttcaaaatataggtattatcccctttgtcagctaaatctctagcaagttgagaataagcttcttcttccacaagagccccttgatagaaaataatatttgcttttaccttacccttgcttctaaaaagaaggtagttcttatggtttgtagcggttttagcaattctcctagctaatggggaggcttggtaagtattgaagtaaatggtcatcccgacggccattaaaatagcaaggatacttgttgttaaccaaagaaaaatagagtgacgttttatgttcattggaagaaaggattaaagtttttttcgtggccaatagttgtattcatgccatggcctgggtgaacactataatgactaggtaaggtgaatagttcttgacgaataccagtaatgaggtcctcaaagttactggtaggtaagtcagtacgaccgatagtttcacgaaatagagcatcgccagtaacgactaattcatctgagtggaaaacaaacgagactcctccccaagaatgaccaggtgttggtaaaactgtgaattcaaaaccatttagttgatagggttgctttaatttaaaaaagttctctgccggtcttgctataacattaatgatatcatcatgacggcctaacccagataaattatcatctggggaagatagccaagcggcttctttttctgaaacataaacaggtggattatcaaaagtatctctgaccaaatctaaactaaaaatatgatcatagtgagtatgagttaagaggatagccactaaaggtttttcaaaggatttaattttagcaataatttcttggccattgctccctggatcaatgaggataacagcttgatcattaacgaggtaataagtattttcaccagcaatgtggtttattgttttatagattttcataatgatagtgtaccaaaaaatcaagactttgttaaaaaaagagtggcggaaaataaatggcaactagtttcagaaaatatgggatctcacagcaatttcttgacaccgttttcataaaggtgtatcataaaagtaatcaataagccaagcctaaagctgaacttagtttaagaacactgactttttgagagcaacctaattggttgactaaagaatatgaggtggaagatatgtcaaaagttgctattgttactggtgctggtcaaggaattggatttgctattgcgaaacgtcttcatgcagacggctttaaaataggcgttttagactataatgaagagactgctcaggctgcggttgataaactatcacctgaggatgctgttgcagttgtagcagatgtttcaaaacgtgatcaagtttttgatgctttccaaaaagttgtagatacttttggtgatttgaatgttgttgttaacaatgcaggtgttgccccaacaactcctcttgacactattactgaagagcagtttgaaaaggcttttgcaatcaatgtcggaggaactatttggggaagccaagcagctcagaaacattttagagaattaggtcatggcggaaaaattataaatgcaacttcacaagcaggatgtgaagggaatcctaatttgactgtttatggtggtacaaaatttgcagttcgtggtattacacagactttggcaaaagatttagcatcagaaggaatcacagtcaatgcttacgcaccaggtattgttaaaacacctatgatgtttgatattgcccatgaagttggtaagaatgcaggcaaagatgatgaatggggtatggagcagtttgccaaagatatcactttgaaacgcttgtctgaaccagaagatgttgctaatgcagtaggcttcttagcgggagatgattcaaattatatcactggacaaacaatagttgtcgatgggggtatggtattccattaaaaatgattaatgctaacactgtgagtttcactcacagtgttttttatatttcttaaaaaattatcttatcttggttattggagtgatggcatctttgaggtatagtcatgttttgttttatagatatagcgtgctataatagacttactatgacccagaaaaaacttagaaaatatgcagtagttgacttggaggctactggagcaggtcccaatgcttctattattcaggttgggattgttattatccaaggaaataaaattattgatagttatgaaacagatgttaatcctcatgaatctttggatgagcatattgttcatttgacaggtattacggataagcagttggctaaagctccggattttggtcaagtggcgcatcacatttatcaattgattgaagattgtatttttgttgcccacaatgtaaagttcgatgcaaatttattggctgagcaactatttttagaaggctgcgagttacgtacaccaaggatagatacagtagaattatcacaagtattttatccctgtttagaaaaatattctttaggggcattagcagaaagcttaaatattgaattaacagatgcgcacactgctattgcagatgcaagagctacagcacagttattcattaagttaaaagctaaaattagtagtttacctaaagaagtgttggagaccattttaacatttgctgataatcttttgttcgaatcctatttattgattgaagaagcttatcaagaagctgatttcgttaatcctaaagaatattatttctggcaaggattggtcttaaaaaaagaaaaagctgttggaaagcctaagaaattatctagtgattttcaagttaacatggctttgttaggtatggatgctcgccctaagcaagttgtttttgctgacttggttaaagcgcattttaatgatcaaacaacaacgtttttagaagctcaaccaggacttggtaaaacatatggttatctcttgcctttattggatcagtctcaaaaacaacaaataatagtatctgttccaacaaagattttgcaagatcaaataatggctaaagaaataaagcacattcaagaactttttcatattccctgtcacagtatcaaaggaccgagaaattacttgaagttagatgcgttttataagagcctccaagtgcaggatcgaaatcgattgataaatcgttttaaaatgcaactgctagtgtggttgacggaaacgactacaggtgatttggatgaaattaaacaaaaacaacgattagaatcttactttgaccagctaaaacacgatggagaagtgactcaatcatcacttttttatgatctggatttttggaaacgcagttatgataaagttgcacaaagtcaacttgttattatcaatcatgcttattttcttgagcgtgttcaggatgacaaagattttgcaaaggggaaggttttagtttttgatgaagctcagaaacttgttttgggactggaaaatttttctcgtgggcaacttgatattagtcaccaattgcaggttattcaaaaaataattgatagttctattccattattacaaaagcgccttctggaaagtatctcttatgagctaagtcatgcagtagaacttttttatcgtcataattcttttgaattttcagagacctggttgaaacgtctaaaaaatagtataaacgctttagaagtagtaggattagatgagttacaaacttttttcacagctacttatactaactattggtttgaaactgacaaagtcaatgagaagcgtttaaccattttacgtggggcgagagaagattttcttaaattttcaaagttcctcccccccacaaaaaagacctatatgatatcagcgactttacaaatcagtcccaaagtctacttgtcagatcttttaggaggattttcaagtataagtacagaaaagatagcgcatgagaaaaatgccaatcagaaagtatggattgatacctctatgcccaatatacttgatttatcaccggaacagtatgcttacgaaatagccaagcgtttacaagatataatgacgttaaagcagcctaccttagtcttattaacttctaaacagacaatgtttatggtatctgattatttggataagtgggagataaaacatcttactcaagataaaaatggcttagcttataacgttaaaaaacgttttgatcgtggagaaagcaatcttcttttaggtacaggatctttttgggaaggtgttgactttgtacatcgtgatcgtcttattgaagttatcacgcgattgccttttgatactcccaaagactattttatccagaaactatcgcagagtttaacaaaagaggggaaaaacttcttttatgactattctttaccaatgactgtcttaaaattaaaacaggccttgggacgtactacaaggagagaagaacaaaagtcagcggtaattattttggatagcagattggttattaaatcttatggacaaaccatcatgcattctcttggtagagattttgaaatttctaaggaaaaaattaacaaggtcttgactgaaatggctaaatttttgatataatggtaaagatcattgtctaaaaataagattttgacagtgcgactcaagattaaataatagtagtacgttgataaaaggaggagtaatgacctatttgtcagaacgtgtactcaatatggaagagagtgttactttagctgcgggagctaaagcaagagaactcagagtacaaggaagagatattcttagtttaactttaggggagcctgactttgctactcctaaaaacattcagcaagcggctattgaggctataacagatggacgtgcaagtttttacacaccatcaagtggtttgccggagttgaagtcagcaattaatgcgtattttgaacgtttttatggctactcccttaaacctaatcaggtggttgtgggaactggtgctaagtttatcctttatactttctttatgacagtactgaatcccggtgatgaagtaattattccgactccttattgggtatcttatgctgatcagattaagatggctgaaggtaagccagtttttgtcacagcaaaagaagttaatcacttcaaagtaactgtggaacagttagaagctgttaggactgataagacaaaagtcatacttcttaatagtccatcaaatcctacaggtatgatttataaagctgaggagttggaggctattggaaattgggcagtcgaacatgatatcctaattttagcagatgatatttacggtcgattggtttacaatggcaatatttttacccctatttcaagcctttcagagtctattcgaaaccaaacgatagtcataaatggagtttctaagacttatgcgatgacaggttggcgtgttggttttgcagtgggtaatcatgatattatagcggcaatgtctaaagtagtcagtcaaacaacttctaaccttacggctgtctcacagtatgctactattgaggctttaaatggttctcaagagtcatttgaaaaaatgaggctagcatttgaagaacgccttaatatcatttatccattgttgtgtcaggtccctgggtttgaggttgttaaaccacaaggtgctttttatcttttcccaaatgttacaaaagcaatggaaatgaaaggatatacggatgttacagcattcacggatgccattcttgaagaagttggacttgctttagtaacgggtgctggttttggagcgccggaaaatgttcgtctgagttatgctacagatcttgaaacccttaaagaagctgttcgtagactgcatgtctttatgggaagtaatgaaattaattaaataaaaatagagagaaacttatgtcaaaaaaacttatttcaattgttgatgttaaagattatgttggtcaagaagttactattggtgcttgggttgctaacaaatcaggtaaaggtaagattgcgtttgtacagttgcgcgatggttctgcctttttccaaggtgtcgcttttaaaccaaacttcattgaaaaatatggtgaagaatcaggtcttgaaaaatttgacgttattaaacgtctcaaccaagaaacatctgtttatgtaacagggattgttaaagaggatgaacgttcaaaatttggctatgagcttgatattactgaccttgaagtcattggagagtcacatgaatatcctataactcctaaagagcatgggacagacttcttgatggacaaccgtcatctttggttgcgttctcgtaaacaaatggctgttatgcaaattcgtaacgctattatttattcaacttatgaattctttgaccaaaatggttttatcaaatttgatagcccaattttatcagaaaatgcagcagaagattcaacagagttatttgaaacagactattttgggaaaccagcatttcttagccaatctggtcaattataccttgaagctggagcaatggctctaggccgagttttcgactttggtccagtctttcgtgctgaaaaatctaaaacacgtcgccatttaacagaattttggatgatggatgctgagtattctttcttgtcacatgaggaatcacttgacctccaagaagcttatgttaaagcattgatccaaggcgttctagatcgtgcgcctcaagcacttgatattttagaacgtgatgttgaggctctcaaacgttatatcgcagagccattcaagcgtgtttcttatgatgatgctattacacttcttcaagagcatgaagcagatgaagatacagattatgaacatttagagcatggtgatgactttggttcaccacatgaaacttggatttctaattactttggagtgccgacatttgtagtgaattacccagcaagctttaaagcattttatatgaaaccagttcctggaaatccagaacgcgttctttgtgctgatcttctagctccagaaggttatggagagatcattggcggctcaatgcgtgaagacgactacgatgctcttgtggctaaaatggatgaactaggtatggataaatcagaatacgacttttaccttgaccttcgtaaatacggctctgttcctcatggcggttttggtataggtattgaacgtatggtaacttttgttgctggtaccaaacatattcgcgaagctattccattcccacgtatgttacatcgtatcaaaccataataaaaaagcgctagctagtgcgcttttttattatggtctttagaatcgttggttaattaaattgggactatgtttttttaacaatgtgattgtcgaaaagacaaggataagactgattagtcgatccatataatctgttccaacttgaacaagtatcaaactacttgtcatgtctaatccaattccatgtaagaattgtgctataatacttgagccactagaggtaattcctttaaaaaggataactgttataactgaagcaataatagttcctggtaaagaaataatcagtgatttccacaataggctagagggtttacaattccttttaatcaagatacccgtaatgatagcaaccacgatggcgactggtgaataataaagtgaaaaaatatcagtagtcatccaattgatgagtgcactgagaaaagcagtgctggcagcgtaccatggtcccaggataactgctattaacaatgtacctatagtatctagatagataggtaggcgtaaaaatagagctaaattagccccaacaaggttgatggcgatagcgattgagataaatgaaattaaacgagcaggtgattttgtcatttgttaagtcctaacatttctaagtcttcaatgatgactgaattttgtgcatgtaataggacggtcataaaatcattccaaaataaattagtattgactgaggttaaaatcttactgttagcatcttttttataaaaatgatactgatctacaattgtttgtcccatggcgattccgtgacaagcaacatcggtatagctatcaaaaccagtagcgatattttcattaacaaagtaagcaatagctaaaggatcatttatcacacatccaataatatgctcatattgccagtgaaaatcgaagtagaactttgtgattttttggataaaacttgatacgtctggattaatacgctccatataagataaatgattgggggttaatacaatatgacgtgtgatgtctagtccaaccatctctatttttttgtcaaggttttcaaatacatattgtgcagcatgaggatcacaccaatagttgtattcagcaactggagaacaattgccatgtgatttaaaacttcctcccatgctaataaatcgcttgcaatgtttgcctaatttgggattagtttgtaaggctcgagcgatattggtcagaggtccgagagctataatagaagtatcatttttgtgttcaaaatagtttgctaaaaaacaatctgctgattcttcttgaaagataattggttgcgccaatgtaaagttattctctccaaggccatccattccatgagtatcctgagcagatacaaattcacgttgtaaaggcaagttatcaccaacataaactggaatgtcgtgacggtttagtaattcaagcgttacaaaggtattctttagtcctagctcaacaggcgaattgcctgctgttatagtaatagcaacaacttctaacttaggatgctgaatagcatacatcagtgctaaggtatcatcaataccgggatcgcaatcgataataattttttctttattcatttgtctcctttcttttaatattagtgaatgttctatgcttttatgaaactattaacaatagtcatggcaataaaaaagatcttggcagttaccaagatcacacgaaaaaatgaatttagttttctaaattcaatcatattttcagtcacttagttttttattctgggaagttttcgaaccagtccgagaaatactcgattatgcacgtgttttattataatatgaaagcactaacttgtaaagattcaaactgaccatttaacagtgtctagattgattgttttagcatttgaaattaattttgaaatcggacatctgctgtgtgctttgttaacgattagcttactatcagataatgacagtttttcaatactagcaacagcgttaacttggaaataaaatcccttacctacttgcttttccttcatgagctggcaagtaacatcaacgcgagattttaggtctttgaatcctttttgttctaaaatagcttttatagttgcatttaaacatgttgaccatgctaaagcaattaattcctcaggattaaatcctggtaaatgatttaaagggtgattggtctccacaatttttccattggagagataaacttttccatcaacgccttgagtgtttgatgaggttacttcataaagcataataaactcctttgggtctagtttaccaaatttgggagcattccgacaagattttactatttagaatgagtttcttttcctctgaagtaaaatcctaattgctagccatttgtggtataatggcataaaacataagagaaagaggtaatcgtaatgtcagacgaacaaatcaaacttgtgattgtaacaggtatgagtggggcaggaaagacagtggctattcagtcatttgaagatttaggatattttacaatagataatatgccgcctactctagtgcctaagtttttagaattagcagcacaatcaggagatacaagcaagattgctatggtagttgacatgcgtagtcgtcttttctttagagaaattaactctattttggatagccttgaaattaatgataatattaactttaagattctatttttagatgctactgacaccgagctagtgtcacgatataaagagacacgtcgtagccaccctcttgctgccgacggcagagtgttagatggtatttctctagagagagaactattagcaccgcttaaaagtatgagtcagaacgttgtggacactagtgaattaacaccaagacaactacgtaaggtcatttctaaagaattctcaaatcaagatagtcaaagttcttttcgtatcgaagttatgagttttggttttaaatatggtatacctttggatgcggatttagtattcgatgtgcgttttttaccaaatccatactataaaccagaattaagagataagacaggtttagatactgaggtttatgactatgtcatgagttttgatgaatcagatgatttttatgaccatcttcttgccttaataaagccaatcttaccaggctatcaaaatgaagggaaatctgttttgactgtggcaatcggatgtacaggtgggcaacatcgtagcaccgcttttgctcatagattatcagaagatttaaaagcagattggacagttaatgaaagccatcgtgataaaaataagcgtaaggagacggtaaatcgttcatgagaaaacctaaaataaccgttatcggcggaggaacgggaattccagttattttgaaaagtcttcgcttagaagatgttgagattacagcggttgtcacggttgcagatgatggtggttcgtcaggtgagttgcgctcagttatgcaactaacaccaccaggagatctaagaaatgttttggttgccttgagtgatatgccgaagttttacgaacaaattttccaatatcgttttgcagaaggtgatggggattttgcaggtcatcctttaggaaatcttattattgctggtgttgctgaaatgcaaggttcaacttataacgctatgcagagtttaacacagttctttcatacaacaggaaagatatatccatctagtgaacatccgctcactctgcatgctgtttttaaagatggccatgaagtggttggagagagtcaaatagccgattataaaggcatgattgaccatgtgtatgtcactaatacttataatgaagagactcctacggccagccgcaaagttgttgatgcaattttagaaagtgatatgattgtgttggggccagggtcacttttcacctctattttacctaacctagttattccagaaattaaacaagctcttttagaaactcgggcagaggtagcttatgtatgcaatattatgacacaacgtggtgaaactgagcattttacagacgcagaccacgttgaagtattgaaacgtcatttaggacaagatgctatcgatacagttttggttaatattgaaaaagtgccagagtcttatatggaaaacaatcattttgatgagtatttggtacaggttgaacatgatttttcagggcttagaaaacatgccagacgtgtcatctcgtctaactttttaaaattagaaaaaggtggagccttccatcatggtgacttcgttgttgaggaactaatgaatttagtaggaacacatttatgagttttacagtaaaagtcaaagaagagctgctaggtcataagagtgaaaataagatggaactgtcagctattatcaaaatgtcaggtagtttaggattagctaaccacggccttaacctttctattactacagaaaatgctaaaattgctcgtcatatttatagcatgctagaagaacattatcatttgcagccagaaatcaaataccatcaaaaaacgaacttacgaaagaatcgtgtgtatactgtttttattgaagaaaaagttgatgttattcttgctgatttgaagttggctgatgctttttttggtattgaaactggtattgaacactctatattggacaatgatgaaaatggaagagcttatctcaggggagcattcttatcaacgggtactgttagagaacctgattctgggaaatatcaactagaaattttttctgtttatctagaccatgcacaagacttagctaatcttatgaaaaaatttatgttagatgcaaaggttattgaacataaacatggagcagtaacttatttgcaaaaagcagaagatattatggatttcttgatagtcattgatgccatggaagctagagatgcttttgaagagattaaaatgatacgtgagacacgtaatgatattaatcgtgctaacaacgttgaaacagctaatattgctagaacaatcacagctagtatgaagactatcaataatattatcaagattatggatactattggttttgatgcactgcctagtgatttaagacaagtagctcaggtgcgtgtggctcatccagattactctattcaacaaatagcagacagtttagaaacgcctctgagtaagagtggcgttaaccatcgcttacggaaaataaataaaattgcagatgaattatagaaggagatattcacatggcttgtacaacaatattggttggtaaaaaggcttcttatgatggttcgactatgatcgctagaacggaagactctgttaatggcgatttcacacccaaaaaattaaaggtaatgacatctaaagatcaaccgcgtcattacaaatcagttttatcaaattttgaagtagatttaccagataacccacttccttatacttcagtaccggacgcattgggaaaagatggtatatggggtgaagccggtattaacagtaaaaatgtagcgatgagtgctacagaaactattacaacgaattcccgcgttttgggtgcagatcctttggtttcagatggtataggggaagaggatatactcactttagtgcttccctatattcagtcagcgcgagaaggtgtggagcgtttaggtgctattttggaaaaatatggaacctatgaatcaaatggtattgctttttcagataccgaagaaatatggtggttagaaacaattggtgggcatcattggattgctcgtcgcgtacctgatgatgtttatgttactaatcctaaccaactaggaattgatcattttgaatttaataactgtgatgactacatgtgctctagtgatttgaaagagtttatcgaacaataccatttagatttgacctattctaatgagcatttcaatcctcgatatgcttttggtagccaacgtgataaagatcgtcattacaacacaccaagaagttgggcaatgcagcgttttttaaatcctgaaattgaacaggatccacgtagcttgtttattccctggtgtcaaaagccttaccgaaaaattactgttgaggatattaaatatgtgttgagtgatcattatcaagacagtgtgtatgacccatatggaccagaaggggatgcggtaagtaggagagcttttcgttcagttggtatcaaccgaactagtcaaacgtctattctacaattacgaccaaataaatcacttgaaacgacaggtgttcaatggttatcttatggctctatgccatttgcaaccatggtgccgttgtttacacaagttgagactgtaccaaactatttttcgaatacaaccaaggatgcttcaacagataatttttattggaccaatcgtttaattgcagctctagcagatccacacttttatcaacatgaagctgatattgaaagctatatcgagagaacgatggctcaaggacatgcacatattaacggtgttgatagagaagttgctgagaataaagagattgattttcaacagaaaaatcaagaaatgagtgactatatccaaaaagaaagccaagaattgttaaatcgtattctatttgatgcaagtaatttaatgacaaatcgcttttcaatgggagattaaaaaactcggaatattttccgggttttttaagataaaaacgcttgcataagtatataaaacttgcaaaaaaaaaatatcgtgctatactttactagtaaaatattaaccggtaaataacgggttaaataaaaaggagaaaaaatgagaaagaaatttcttttattgatgagctttgtagctatgtttgcagcttggcaacttgttcaagttaaacaagtttgggctgatagtaaacttaaagtggtaacaactttttacccagtttatgagtttacaaaaaatgtcgttggtgataaagctgatgtatctatgttaattaaagcaggtacagaaccgcatgattttgaaccatcaactaaaaacatcgctgccatccaagattcaaatgcttttgtttacatggatgataacatggaaacttgggctccaaaagtagctaagtcagttaaatccaaaaaagtaacaactattaaaggtactggcgatatgttacttactaaaggcgtcgaagaagaaggtgaagaacatgaaggacatggtcatgaagggcatcatcatgaacttgacccacacgtatggttgtctccagaacgtgcgatttctgttgtagaaaacatccgtaataaatttgtcaaagcttatccaaaagatgcagcttcatttaacaaaaatgcagatgcttacattgcaaaattaaaagagcttgacaaagaatacaaaaatggtttgtcaaatgctaaacaaaagagttttgtgactcaacacgcagcgtttggttacatggcgcttgattacggtttaaatcaagttccaattgctggtcttactccagatgcagaaccttcatcaaaacgtttaggcgaattagctaaatacatcaagaaatataacatcaactacatttattttgaagaaaatgcttcaaataaagttgctaaaactttagcagatgaagttggcgtgaaaacagctgtgcttagtccacttgaaggactttctaaaaaagaaatggcagctggcgaagattacttctcagttatgagacgtaatttgaaagttcttaaaaagacaacagatgttgcaggtaaagaagtagctcctgaagaagataaaactaaaacagttgaaacaggttactttaaaactaaagatgttaaagaccgtaaattgacagattactctggtaattggcaatcagtatatcctcttcttcaagatgggacacttgatccagtttgggattacaaagctaaatctaaaaaagatatgactgctgcagagtacaaaaaatattatacagcaggttacaagactgacgtagaatcaatcaagattgatggtaaaaaacatcaaatgacctttgtacgtaatggtaaatcacaaacatttacatacaaatatgcaggttacaaaatcttaacttataaaaaaggtaatcgtggagtacgttatctctttgaagctaaagaaaaagatgctggtcaattcaaatatatccaatttagtgaccatggtattaaaccgaataaagctgaacacttccatatcttctggggttcagaaagccaagaaaaattatttgaggaaatggaaaactggccaacatacttcccagctaaaatgtctggacgtgaagttgcccaagaccttatgtctcattaatatttaaaagatgatatcggatacgatatcatctttttttctttgtacgtgataggctcaaacatagaaaaaagcacttctaatagaagtgcttttaaaattaatgctatgcttattgagcagcgtttgcgtctttgagaccatattttttgttgaaacggtccacacgtccatctgcttgagtgaatttttgacgtcctgtatagaatggatgtgaatctgatgagatttccacacgaataagtgggtaagtttcaccttcgaattctactgtttctttagttgatttagttgaaccactaaggaatttgtaacctgtagttgtatctaagaaaacaactggacgataatctggatggatgtcttttttcatctttaaaaatttcctttctgccataactcgtctgagtcatagttattaaccactctattctatcaaataagaatagtcttgacaagtgttttgataaaaaaagtaaaattataaagaaagtatttcctggatttcttggtaaatagcttgattctcttccaaactataagaattagctccgctggctaaaggatgtccgccaccattatgacgtttagctatttcattaatgatgtgtgacttactacgtaggcgcacacgataatgcccatcgctttgttcaacgaaaattgcccaactttctacaatatcaatttttccaggtacaccaacgattgcagcagtctctgcatctgttacatcgaagcgttttaggtcttcttgtgttaaagtaacgcatgcagcgccgttcttgtcaattttaagttgctcaaaaataaagccttgtaattttgcaattttgaaaggaaaggaatccatttgacgtgccattgcagaaaaatcaaagtcaaattcacgaagtttgctagcaatcttcagtgttttacttgtggtagcaggatataaaaagcgtcctgtatctcctacaataccattatatagaactcttgctgcacttgttgataacaacaaatcacaagaaagagcaaagtctgtcacaatttcacttgcactagaggcgttagtatctacataagagagatctccatagacttcatcgtttggatgatggtcaattttaattaaaaagtcaccttttttataacgttcatcatcaatgcgtggggtatttgctgtatctgtaacaacaacaagagcgccttgatagtcttggtcggtcacttgatccattttagcaatccaagcgagagtgggttcgtcaaaaccagtagcaagtacttttttctttggaaaattatgcctgatgatatcccttaagccgatttggctaccaagagcatcagggtctggtctcatatgtcgatggataatgatggtgtcgtactctttgattttatcaagaatttgttgaaaaataatcattttttacctacctaactgttttgtcttttagtgaagaacaaggctatattgttgactatattatagcttaaatcttttattgaggaaagaaattaagatagcggtcacaatgtttgtttatttttatatgatggtatgttatttttttataaaattcggatactgctaactaataatcttttttataataatattttgtaaatgtattgctttttagctaacttttgttaatatagtaaaaatgctttttaataggagataaattatgacacaagcagtattaaaagaattggctaaggcggagttgcattgtcatctagatggctcactttctttaccagctattagaaaattggctaatatggctgatataatactgccgagtagtgataaagaattaagaaaatatgttatagctccagctcaaacagaaagcttggtagattaccttaaaacgtttgagtttatcagaccgcttcttcaaacgaaggaagcattacgttttgctgcttatgatgttgctagacaggcagctttagaaaatgttatttatattgagattcgttttgcgccagaactctctatggataaaggtttaactgcaagtgatacagtccttgcagtcttagaaggtttagcagacgctcagaaagaatttaatatcgttgcacgcgcccttgtttgcggtatgcgccaatcgtctcataaaacgaccaaggacattattaaacacattgttgatttggctcccaaaggcctggtaggttttgattttgcaggtgatgaattttcctatccaacagatagtttagtagatcttattcaggaagtaaaacgctcaggttacccgatgactttacatgcaggtgagtgtggttgtgctaagcatattgcggatagtttaaatttagggattaagcgtatgggacatgtgacagctttaacaggacagagggatttaataaagcgatttgtcgaagaagatgctgtagcagagatgtgtttaactagcaatttacaaacaaaagcagcctcaagtattcaaagttttccttatcaagaactttatgatgctggaggtaagattacaattaatacagataatcgtactgtttccgatacaaatttgacgaaagaatatagtcttttcgtaacttattttggaacgaaaatagaagactttcttgttttcaatcaaaacgctgtgaaggcctcctttacaagtgattcagagaaagatactttactacataagctacaagaaaactatgacagctatctaaaataaccttcacgattctttaaaaatatgatagaatagtggtaatttacaagtggaggaagatatggctttagcaaagattgtttatgctagcatgaccggaaatactgaagaaattgctgacattgttgctgataaattacgtgacttgggtctagatgttgaagtagaagagtgtacgatggttgatgctgcagattttgaagatgctgacattgcaattgttgccacttatacatatggtgatggagatttaccagatgaaatcgtggacttttatgaagatttagcagaggttgatttatctggtaaagtttacggcgtagtgggttcaggtgatactttctatgattacttctgcaaatctgttgatgagttcgaggctcaattcgcattaacaggagcacaaaaaggtgctgattgtgttaaagttgatttagcggcagaagacgaagacattgaaaacttagaagcttttgctgaagaaattgcttctaaacttaactaagctaccaaaaagacgaacacgagtcgtctttttaacttttttaccatcttttgtaactagaatatgagatatagatatggaattagaagagattcgtcaagaaatagatgaaatagatcagcaattagtaagccttttagaaactagaatgggtctaattttagaggtcatagcatttaaaaagaaacatcgacttccagttttagataataatcgtgaaaacgaagtgcttaacaatgtattgaagaaagtccaaaaccatcaatttgacgatgtgatacgagcaactttcaaagacattatgacagaatctcgtgtttatcaaaaggagaatattgtagacggtgattaaacgatttgataattatgctcagtacgtacttgttttaggttttagcttactaattggtggtgtggttggggctattacagcagtctttggacgtgttctattattcctgacagcctttagaagtgattatatagcttacctactcccttttcttagcattgttggtttatttatagtttttgtctatcaaaaatttgggggtaagagtgttaaagggatgggattggtatttgaagtaggtcatggtaatgaggagactattccgaaacgtcttgttcctctcgtgatattaacaacttggttaacccacttatttggtggtagtgcaggtcgtgagggggttgctgtacagattggggctaccgtttcacactactttcaaaaatattgccgtttacaaaacgcttctcaacttttcctagtaatgggaatggcagcaggttttgctggtttatttcagactcctttagctgctactttttttgcgattgaagttttggtagtaggtcgtttaatggtttcgtatgtattaccaagtttaattgctgccctgacagcaaatttcgtctcacattctttaggtttagaaaaattttctcatagtatagcaacatcaatggcgttaacaccagatattattctaaaattattggttttaggactatgttttggtctgtgtggtaatttatttgcttatttattggctaaagctaaattaattgcttctagtaggttgctaaacccatataaacggattttcacacttggattgttagctacttttttattgtttatcttccattttggacgatattcaggactgggaacaaatctaattgaggctagcttcactaataagaacctttatgattatgattggttgttaaaattgtgtttgacagttattactttggctgcaggttatcagggaggagaagtaactcccttatttgcaatcggagcaagtttaggagtgattattgcgcccattttaggtttgccagttattttagttgctgctttaggctatactagcgtttttgggagtgcaacgaatactctgttaggtcctatcttaataggaggcgaagtctttggctttgccaacactccttattttgttattgtatgtcttgttgcttactccatatcacatgctcatacgatttatggtgctcaatctagatagttagtgatgagttttaaaagagtttatcagtttgtagaacggaatattccgttctcttttttattctcttaaagtttataaaaatggagtttgtcaattttatgaatgcaaaaattatgtggctaatataatttcttcaaagaaattgattttatgattgtcattaaaatactgtaaaatccaattgaatgtgtaggaacttaggttaggataatgtctacaagcatttaagtcgcgatggtgaaatgcattataagataaaaagttgatgtggatttcaactttatgggaaagagttaagtgacacgaaagctaatatagaaaacgtagcttaaaaaatcaaatattaaatgaattaaactctcaaaaatcagaaaaaagctaacctagaaacagtaaatcaaatttaaataatagacttcctgcgaaacaaaatatggtacaatagttctatgaattatgaagcaagcaaacaattaactgatgtacgatttaagcgccttgttggtgttcagcgcactacttttgaagagatgttagctgtgttaaaaacagcttatcaacgtaaacacgcaaaaggtggccgaacccctaagttaagcttagaagatctcctcatggctactcttcaatacatgcgagaataccgcacttatgaacaaattgcggctgattttggcattcacgaaagcaacttaatccgtcgaagtcaatgggttgaatcaactcttattcaaagtggttttacgatttcaaaaactcatcttagtgctgaggatacggtgattgtggatgcaacagaggtaaaaatcaatcgtcctaaaaaaatcaactagcgaattattctggtaaaaagaaatgtcatgctatgaaggctcaggcgattgtcacaagccaagggagaattgtttctttggatattgcagtgaactattgccacgatatgaagttgttcaaaatgagtcgcagaaacatcggacaagctgctaaaatcttggcagacagtggttatcaagggatcatgaagatgtattcacaagcgcaaactccgaggaaatcaagcaaacttaagccactaactcttgaagataaaacctataaccatacgctatccaaagagagaatcaaggttgagaatatttttgccaaagtaaaaacgtttaaaatattttcaacaacctatcgaaatcgacgcaaacggtttggattacgaatgaatttgattgctggaatgatcaaccgtgaactaggattttagtttcgcaggaagtctaatatacaaataactattctaaaggatgacaccttgttcttctagataaaatagctttacaagtaggttaaaatttggtagaattgtgagagtgtgtgatggacgcacaaaaaacggctaatccgctgagacaagtacttaagattagtaagagaaggagaataaaaatgaatccattaattcaaagtttgacagaaggtcaacttcgttctgatatccctgagttccgtgctggtgatactgtacgtgttcacgctaaagttgtcgaaggtactcgcgaacgtattcagatctttgaaggtgttgttatctcacgtaaaggtcaaggaatctcagaaatgtacacagtacgtaaaatttctggtggtatcggtgtagagcgtacattcccaattcacactcctcgtgttgataaaatcgaagttgttcgttatggtaaagtacgtcgtgctaaactttactacttacgcgcattgcaaggtaaagctgcacgtattaaagaaatccgtcgttaattttgatgatcagattttaaaaatgcttggttgtttgaggatagtaactatgttttaaaactggacaaccaagacgtaaaaaatctgcctgtgggcagtttttttactaggtccccttagttcaatggatataacaactccctcctaaggagtaattgctggttcgattccggcaggggacatgtaaataacgtcaaaagcctttgtattaaaggctttttgttttattccgattttaaaaggggcacaaaaggggcagtttgtttatttataatttctttcatatttacagttgtgtgactgtaaatagataatgttgtttttggatcgctgtgaccaactctatccattatcgcatttagcggtatccctttttctgctaaaaatgatatatgcgagtgtctaaataagtgcgtgtgataatctccataaattttcaatcgcttattgatgtacgcgtttaaaatcggtacaccgttcgaatttggaaagacgaatgaacttgtctttttctgtctattgacgatatctaaaatattatctgatacagatattttgcgtgttgattttttggtcttggtcgtagtgatttctcgtgtgttaaaatcgtaagttgcattaatcagaatttctttattttcaaaatctattttgtcgtaagtcagacaagataattctccataccgtacacccgtcaaaaacatgaataaaacgatgtctgcgagcgtttgttcgtcattgtctatcattctattgcacaggtcgtaaacctcgttagatgttaaataaagcaccttttcaggcttgtaatcatcctttggtttgggaactaagacgttctccgtcggattacttgtcatatagtccatttgtatcgcataagaaaatatggcatgcaatctctttctacatttatgcgtaacatgatacgaattgtgttttaatagtttatcaatgattagtctaatatcacgtttagtcaacttgttgataattgtatcatctggtaacacggttgctatatgactgtcagatactaaataaccacgttttgtggagtctttgacggtcggtatccattgctttagatattcctttttaagttctccgtaagtcatttctgagtgatttctgatagcgagcctatcttcaatcttttcctgcaatattaaaccagcttttttctgagcttgactagaatttttatctagtgtcacagatacttttttgtacttatttgttagagggtcagtatatctttcgatatatttaaatttcccgttggctagctcctctatccacattgttttatacctcattttctgttaaaataggtatggtaaaaacccctcccaaaaagcaggtttttactatactagaatttgcctcacgctctccttggacaaaatttgagcgtggggcttttttattttgtcttaaacgttcttccacaatttgtgcaatgccagttgtttttaccctttttcccaaccaaacctagcaataagaacggccaagcaattaaaaatccgatacaaccgacacaaccattaaaacctttacggtcttggttcataaattgtacttttgtactttggcagtaaggacaacgctgtgcaaaaaatcccatttttaattctcctaattttgatttcagcttttaacgtggttcagatattacacatagttattaattttcctatttacgtttcgactggggtaaaatggcacgttatacaaaatgacgtttaaataatttatggctttcaatgttctgatcaacatctttctcatcccaaatttgcaactcccaaggatagtagtgattgctcttattcttgaaataaacgtgtattcctgtgtaattatctttatctcgtaaataccagttttttaagtcaaacttatctttccattcatcaagttgttccatcacttgtgaaatatcctcagaagataaaatgatacgagcgccaaaaatgtcattgagaatagaattcacaggataaccatcttgtcttttggaaaaacgttcaattttgtctaagatactttccgatgtttttacgcgatagacataaggaatatccttaacatcagctttcatcaagtaatcattgatagattcgtgtaaattcaagcggtaatctaaaatcgcttgaacaggtacttttgaaaaggtatgttttagattaatcttttcaactttcccagtttcaaaataatcttgcgaataaacaaggtgtattctattaatttccgagattaagcgttcaactttttccagcatattaattctccctgtaaatatctacgacttctcctatcgtgcggatgttgtcgttctctgaaagatagatttcctcatagcttttatttaaactttgcaagtaccaagcgccgtcataatcacgtttgagtttttttacaaagttttttccattgacttggaatatccctatatcattcatatcgacttgactagataccttgacgaacagtaaatcgttatcttgaataagtggttccattgaattaccagctactttcgcaatagtatcatacttatcggggacatcatcagcccgtagtttaacttccatatgtaaattgtcttcttggtatgcccccagaccagcagcaactaacccctcaacgtagtcagtgatataattttctgtctcctcaacttttctatcgaacatagaaacaactttattttgttcttctaattgttcgttagcgaagctaaggactttttcttgtctaggttgttctaattgagaagaagtagaagtgattttttgtagggtagaggaagttagatttttttcagttttcgtttcatttaacgcgactatctgattttcgtctagcgaatttaataaatcatcaaaagagatgccaattgtgtcagaaactttctttataatcggaatagatgggatgatttcttttccgttacgaggatctctgtttttttcaagaatagaaacgtaagctttgctgatgcctgattctttagcgaattcagccatgctcagattattggtatctcgatacttttttatatattttcctagatgcatatcgaattcctttcaatataatgtctaacattttaaacatattatacagtacaaaaaaatttttttcaagttttttgtccaacatacttgacaatcatttgtctaacatgttagactataatcaagcttaaggaattaagcaaaacgaaaggaggtacagctaatgaaatctaggctaaacaaaaagcctaaacacaaagaagtcgagttggaaattcacattctttggtttaagcttaggattcactactcaatagagtggtgacaataccaagagggctaagaagccctctcccctaacggggtaagtttagtttagcacattggctgtatctccgcaagaatgaaaggagagtagatgtggaagaatctatattgaactctaagcgctacacaaaacttgtcgtagagacagaagatggcaaaaaaatagcagaagttactttgacggaagcaacccctgctgatggatacgtgattaggttaacccctaattatgactaacctttaggtgggaatggatcgttaccatagctgttacgttcgcgaattcgtccatttttgccatggataataacttcactgctattgtttttagcgataccagtagcgatttcgacagcttcggcttgggttgttgtgtgtttggtcgcacgactgttgcctgcaccttttatatcccaaccgccattagggttaggtacgacatgttgatttttagccattagcttatcctcctttcgttaaggataagttgattataacatttttaggaggtacaaaatgaattggaaaaaactaatgctaggcgatttagaacacacgtttactagtcgtgatggcaaggaaaaaacaagcgttgaatttgaaggcggcgtattgccagcactgttagtgctaggtggtatcacttggctgatcgcttggcttattacaaaataaaaactcccatgagggagtaggaggaaggtatggagtttatttatttactaattataccatcaatagtttcatttgttgtatctatcttttggtcaaaactagtcttcaaaaaagtagtagaaattatgacaaaaatggatgttgatcaacaagagctgaatgaaacaatgagagctcaaattttagaagaaatcaaaacattacgaaacgtcaggtaaacaagtttttgaaaatctaacaccaaataaagtaagagttatcattcctagatttgttagtactcttttgttttgttcttttaattcactgttctttttagttataaagctattattaagaatgttgtaatattctttctcatctacgtgtgctttgtaattaatttgaattagtcctagtctttctaaattagttaatgatgaactttgaatagctatatcattttgttctaaattatctacgaatacatgactagcaatatgctctaacggcttatcttgaccaattattgtcgtatagtaggtaccagttgcaacgaaaccttttttaaagtataaatctgagataattttgaaattttgtgcatcaattttatcaaactgttttattatctcaataaaagatggatggttgaattcattttttgatttatccatagatgaagcaatcaattttgtaaataaatttctaagttcttcttcttctaaataaaatttagatgcttctaaagccggtccagctatcgaaagactaggttcttgtagattttcaatatttttactaacaacatcttgtatttctttagctaatttttgaataaaatcgtttctgttagtaatgtacttatttcttcgattttcagctatttcatgtaatttttcaaaaccaattaatgtcattaaatcatcaatagctcttgcaggattttcagctttctttatggcagtagttcctaagagagtagcagaaccaagcaaaatcgtctttatatcaagactttcaatcataatacaactccgttttttatttcaattataccacagaaagggggtgggggaatgcaacaatttaatctaaaacaactacgagagaaaaaaggatttactcaaaatgaattagctgataaagctaacgttagtcgttcgctcgtggttggtttagaaacaggttcatattcagagacatctacagcatctctgaagaaattggcgaaagctttggacgtaaagattaaggatttatttttttaactaatcgtctaacatgatagacaaaatatttgttaataaaactaacaaaccgctagaaaggaactatatgaatcaactaataaacatcaccctaaacgaaaatcaagaaccagttgtcagtggtagagatttacacaatgtacttaatataaaaactcaatatactaaatggcttgaaaggatgtcggaatatggttttgaagaaaacgttgactatatagctattagtcaaaaaagactaacagctcaaggtaaccgtacagaatatatagaccacgttctcaagctagacatggcaaaagagattgctatgttacagcgaaacgagaaatcaaaacaggtacgcaaatacttcatccaggttgaaaaagacttcaatagtcctgagaaaatcatggcgagagccttgctcatggcagataagaaaatcactaacttaacgatggaaaataatcaattgcagttagatttaaaagaagctcaaaagcaagcgcgttatcttgatctaatcattgagagcaagggagctttgcgagtaacacagattgctgctgattatggtatgtctgtcaataaattcaataaaacactattagaatttggtgtgcagcacaaagtgaatggacaatggattctctataaacgacatatgggcaaaggttacacagacagtcacacatttgactatcaagacaaaaacggccatacaagagccaatgtgacgacgacgtggacacaaaaggggcgtctattcctgtacgagttgttgaaagacaacaatattttgccactaattgaacaggaagacattgtatagaaaggaaacatatgagaccaaaacaatatccgtatagcggaaataaaaaagaatctattgcggtaacagtagattccaaaacgctagccgagaaactagagattactgaccaatcgaatatttcccaagcgaaacaccgattatttggtctgtaaacaagtagacaaacggcattttgaattcttgatgtgaagatgaaatcaaggtatcagcttagacgaatttagataagaaaaaaagtccgacgggaatcggactcaaaacaaacttaatttacttaattatatcacagaaaggaaacaatatgctagcaaaacttaaaagcggtatcgaagtaccttacgaagagctttggcttaatgataacgacttatccgaatttattggaaagtcatttgaccaaacgcagcgattactaagaaagatgtacaaagacagaaattatcgcaaatacattgacaaggttggcggtcgttcaacaaaagttaaaaaatttgaagaatggagaaaattacaaaatgaaaaaattatttaactttattttcgcaaaacaaaaaagaagaaagaccaaaatggacaattgaaacacatgtctaaacgggaaagtgctatatgacctagcagacgtcaatagatctctacgaacaagtggatcgagaaaaggagtatgatatggaaaatccaatgacaggagtagcaatactagcatttatcgctttacttgcatatctcggcaatcgtaatagcaatcaaaagacaattactaagactgttgagacggtgttagataactaccaagttgtgcgaaaggttgagagaccaaaacgcacggattttatagagttacctaccccaggatcatgcgggaaagtttggggcaaggatagacctttttaaggagtattgaatggcagataacaaaaagtattactatctaaaattaaaagaaaatttttttgaaagtgatgaagcaatcattttagaaagtatgcctgacggctatatctatagcaatattttgctcaagctatacctaagaagtttaaaaaatgacggtttattaatgtttaacaaccttatcccttacaacgcacaaatgcttgcaacgattacaagacatcaggttggcactgtcgaaaaggctattcaaatttttagagacctacaactaattgaaattcttgataatggtgctatatatatgacaaatattcaaaattttgtcggaaaatcaagcactgaggctgacaggatacgaaaactaagagcaaaaaataacagtggtgtacaaatgttgtacaaatgtacaccagagatagagatagagaaagataaaaagatagatataaatatagataaagagttagaactagaacaagataaagaagataggtttgttgatgttgttgaagcaaatcttggtagaggtcttgtaaagtttgagttcgacatgattaatgactatctcattggacaaaatgtctcaaaggatttgtttttggaagctgttaaagtagcagttgctaataatgtccgcaaatttaattacatcgctcgcattttggataattggattaatgatgggataaagactcctgaacaagcatatcaggctcaaagagactttaaagctaaaaaagctaacaaaacaatgcaatcacaatccaacgttcctagctggtctaatccagactacaaaggaccagatttaaaagaatttgcactaggaagcatagacgatatagaagatggatcaggagatttttaatttttttaacaaacaaatcaaaaaagattttggtaaaacggcgagtaaagagacttttgctaagtttgctagttactgcgccgaaggaatcgaaaaaaatggagttaagccaatttttaattggataaacctatacgcttttggaaccggtatgacaacagcagaagcagaccgattaagaatagagcgatataaacaggagaatacgttatgacaaaacaacatagagaaacgcttatctggtaccgagcaagtcatcaagagcgtgagaagctgcttgattttgggctagttgataaatcacagtacgtgacactattgcggcaattgcgcaagaaatatgcgatttaggaagggatatatggttgaaatcagaattaacggtgagtcaatcacatttgatagcaattttagggatgcgcttatatttacggtagatcacctaaaaaattatgacgatccttctttgaggcagacttacaacgagtttaaagattatacagacgaggacttgatgggatatatcagcacagaatttgatgtagacccggaaatgtttgttgatactaattcagacagcagatggaaaattaaacaacgaattttagaggactgactgtgaacgaagaaatatatgagtctagtcgttactggcaaagtagatacagcgacttgatgtctgattatcttaaagaagctgaagaaaatatagagttaaagaaacagttgaagagattaaaagccgaaaattggcagctgaaacacagaaagaggaaatgatatggcttatttatacgaattagaaggtatttacgcacaattacagtcaatggatttagacgaagaaacattccaagatacacttgacagcattgattttcagtcagacttagaaaataacattgagtattttgtcaaaatgttaaaaaatgtgcaggctgatgctgaaaagtataaagccgaaaaagaagctttttataaaaagcaaaaacaagcggaagccaaagcggaaaaatacaaagagacgatcaggcttgcaatggaattgagtcaaaagaaaaaagttgacgctggaatgtttaaggtgtctttgcgaagaagtaaaaaagttgagattttggacgaaacaaaaattcctcttgattacatgcaagaaaaaattgaatacaaaccaatgaaagctgaaatctcaaaagctttgaaatctggaattgatatatctggagttgaactaatcgaaacagaaagtttgcaggtaaagtaaatgaggaaatcagaaagtataacagaatatgctaaagccttttgtaaagctcagctagaggtaaaacaaccactaaaagataaggataacccatttttcaaaagcaaatacgtgccgcttgaaaatgttacagaagcaatcacaacagcttttgccaataacgggatatctttttcgcaggacccgacaacaaacacagaaaacggttatatcgatgttgcaacgcttgtcatgcacacgagcggcgaatgggttgagtacgggcctttaagtgttaaacctacaaaaaatgatgtacaaggcgctggttcggctatcacttacgcaaaacgctatgcactatcggcaatttttgggataacaagcgatcaagatgatgacggcaacgaagatagtaaaccaaacaattccaggcaatcgccaaaagctacaactaaaaaaacacaaaagacaggatatcaaacaccaaaaatcagcaatatccaaatcgagacttacaagtctgatttaaatgatattgcgaaagccacaaaccaaaacgttgaagagttaacaaaatggctaaccgatactttaaaagtgggggaactagaaaatttgcatacggaacacattgtttcagcagacgaattaatcaataaactcaaaaagaaagcaggactaaaaaatgattaacaacattgtactagtaggtcgcatgaccaaggatgccgaacttcgttatacaccaagtaatcaagcggtagctactttttcacttgcagttaatcgtaattttaaaaatcaatctggcgaacgtgaggctgattttattaactgtgttatttggcgccaacaagctgaaaacttggctaactgggcaaaaaaaggtgctttggttggaattacaggtcgtatccaaacgcgtaattatgaaaaccaacaaggtcaacgtatctatgtaacagaagttgttgcggaaaatttccaattattagaaagtcgcaatagccaacaacagactaatcaaagcggcaatagttctaattcttattttggcaatgccaacaaaatggatatttcagatgatgacttaccattctgagtgtttcgctaagcttctctcaatctaacaggtgaaagtcctgtcctaacaattaaccagttcggttaggtagctatggcatacgtatgcggagtaatccaaatgcggaagcaatgccgactaacgttatccccagtaggctgatattcattggtcttatctcagtccgtgggagcgagcaaacctacagtccgtaacgaaagtgaacttccgctaagtgtcgttaaggtcattccaatgagtataactgagagagttggaaatagagttgtcgagcctttagaatgggggcgaagactggaattgttgtcagttctaactggtatatactggcaataaagctctcggcatatagaagatggaatgtaggtaaagatgagcgaggaacgaaagagacccttttctatcatacatatcccatgtatgtaaggttagatataaggaaaacaccgaagttctaattgacgtaggaatagggagtcggagaggttcatagtaccgataatcatacgagacaacaaaactcgatgtagagaaggagccttgcctttatcggtcttaccgatgaaagaggaactagatgattgctcagaaagctataaacatctttgaaaaggttcaagtatttcaacggaagatatatctatcgaccaaggcagataataagcgaaagtttggtgttttatacgacaaagtatatcgtaaagatatcctgaaagttgcgtggttctatgtaaaaaggaataaaggttcggcaggcattgatgacttcacgattgaagaaattgaagcctacggtgtacagaaatttcttgatgaaatagaagaccagttgagaaacaagaaatatcaacctaaggcagtaaagcgagtttatattccaaaagcgaatggtaaaaagagaccgttgggaattccgacagtccgagatagagttgttcaaacagctgtgaaaatagttatagaaccgatattcgaagcggactttcaagaattttcttatggttttagacctaagcgaagtgctaaccaagctataagagagatatataaatatctcaattatggttgtgagtgggttattgatgccgacttaaaaggttactttgacacgatacctcatgataagttactacttttagttaaggaacgagtaactgataagtctattatcaagttacttagtttatggctagaagcaggtatcatggaagacaatcaagtgagaagtaatattttaggtactccacaaggaggtgtcatatcaccgttgttagcgaatatctacctaaatgctttagacagatattggaagaacaatcggttagaaggaagagggcatgatgcccacttgatacgttatgcggatgactttgttattctatgctcaaataatccgaagaaatattatcagtatgcgaaacagcgtattgataagctaggattaacattgaacgaagaaaagacaagaattgtgcatgcgacagagggatttgattttctaggctatacgcttaggaaatcaaaatctcacaaaagtggtaagtataaaacctactactatccttcaagaaaatctatgaaatcaataaaaggcaaagtaaaagatgttatccaaacaggacaacacctgaaccttcctgatgtcatggaaagattgaatccaatgttgagaggatgggctaattatttcaaagctgggaactctaagcaacacttcaagagtatagataactatgtcatatataatctaacaattatgcttagaaagaagcacaagaagtctggaaagggatggagggaacatccgccgtcatggtactataactactttggactggtttgtttaaggaagttgagtaccaatatcaatgatgatagtcagagatatggtagataacttgtgaatggctataacgtcgaagaaagaagatattgggaaagccgtgtaagggaaaaccttacgcacggtttgacgaggggtttctgaggagatggctcaaatcagcgacctactctacaaaaatgacgaagccgaggaaacaaaggatatatgcaatatatgatgacgacaaatttgtcgacgttggcacaaaagaagagttatcggcacggcttggaattaaaaaagcaacaatagaacagtacatgactaaatcatatcaagcgttagctagctcaaaacgaattgcattgttggtagggattgaagaggaatatgacttttaagacagaatttgaaataccaatcgaaccaaaacctcaaactagacctaagttcagcaaatttggtacgtacgaagatccaaagatgaagagatggcgaaaagaggtttctggatggatagaaaaaaattatgatggaccgtttttcgatgattgcataaaggtagaggtaaccttttacatgaaagcccccaaaacgctatcaaaagagcctacacaacgttctaaaggtaaaacaatacaaatatatcagaacttcgtgcgtgagcttatatggcacgctaagaagcctgatattgataatctgattaaagctgtttttgatagtatttccgatgcaggttacgacagaatacagaaatcaggtatcgtttggtcagatgacaatatcgtatgcgatttaagagcaaagaaaaaatacagtcagaatccaagaataaaagtgaggattgaagagattgacagatgaattaataaatcaattttacaaaatttttgacaatgggattgtaaggcaaattaaaaagctagatgtagattgtaaaaaagccgagcaaataagatgtagcgttacaaataacagacgtcgaaaaaccctgccaagaccgtacgttatcgaagcgtttaaagattattttgacgaagatacctatgcacagatgtatatcaaatcatatcgtgagtatcacaacccaaatgaccacgagacggaactttttgtaaaactaaaaagagcgcacaaagatactaagttagagcattacaaggaagttaagcgattgatgtacgcagcaatgaccttttgaggaggtatagcatggcagataaaataaacgcagagagtatgcaagctgcatacaacgaaaattatcaaatgtttttagctaaaaatgcggattatggaaattcgttcgaaaagtctttggatgacttcggatttatcgctggtgtcgtccgtataagcgataaatacaacaggttatataatcttataaacagtgacaaaaacgtctcagaaagcctgtcagacacgttaaacgacatggctaattattgcgtgatgttagcggtttggttggaggaagaggaacgacaccgaaatttagagcatgggggataaccgatgttaattaataaaaatttagtaagagacattagacttgctatcaatgaatacgatgataattatgacgaagataacgcagaagtttgtatagaagtcattagacgattgattgaacaggaggaattctgatgataccgaattttagagcgtttaataaagagaccaaaaagatgtatggtgttgacggctttgaattaagtgtgcgcaaaatatatagatgcagcttagcagatgatgagtttcgttgtggtcgcttagagacgtttcattttgtcgaggataactttgacgattatatcctcatgcaatcaacaggaatgtttgacaaaaacggtgttgagatttttgatggtgatatagttttaacaacacgtctcatagattacacatataaaaattttaaaggtgtagtaaaaatgttagaaggtcgctggttaattgacacaggtaaagatgcggttggtttgtggactgaagttgatgagaacgaagcaatcggaaacatatatcaaaacagcgaattactagaaagcgtggaagaatgacaaaagaagaagtaattgcatttctgacagaacagcgtgatttgcggcttgttggatatgagtggggaaaagacaatctgtccgtttttgcgagatggcaattagaacaagcaaatatgtatttagatgtcattgagtggatagaggagatgacgaaatgactgaacaacagatgattgattgcttgctttatgagttagcaaaaaaagacaaattgaacattagacgaaacaatatcataacgtttttatcgattgtgctgatggctatatctattttaaacgtcgcactgcaagaccactacaagtcgcaaattacagaattacggacacagttaagcaggacacaaaagcagcttaaacgtgctagtgatgatagagctagacagacaaaacggattgctgagctgactggaaatgggggataaagttgtcattaattgatgaagtaaaagaatgcggttcagaatctcacaaaaaatggtttgataggtactttgatggtttaaaaatcgaggagaaacttaaacagtctgcgatgaaaggattctctggttataaaatctctattccaaaaaatgatgaatacttagctagacgacttgatagccaaaaaacaatagatttactaaaataccgacttggtgacggttttgatgtcgaaataaaaaatcttgaatcatcatataaaatctttggtaaaccagttgtactaagtagagatttatttattttttggaggacaggagataagaatggatgataacacagcagttgttttgatacttttaatattatttttaccgtttattatcggaagttttagagattaagcgaggtaacaaatgaatattgaagacattgaacgtattatttcagaatatctaatttttaggtctgacattgatggttgtgcagtaattgacattgaagattttttaaagcatattcgtttttcgtatgagcgactaaaatagcaaggataatcatgtttataaatgggtaaatgacaaaaaaggttatagaattgagtacaatgaatgcagtgaagtatttttggaggtagcaaatgaatattgaagaagcgaagaaattgatagacaaacagtctattggtaaaggtggtgtcggcgacattccagtagtgaaaacacatattgtaaaagtattactcgaccagattgaccaacctcaaccagaagtgccacggtttgtggctgattggtacgagaagcataaagatagcttagagtgcgatttatatttatatcacatgtcgatatacgatgaagaagtcgaaaaagatgacttctattactggatgcaaacatcaaaaaatccagtctacacacttattaatatgcaccaattcggctacaccatccaaaaagagaagctgtatacggttgagatacctaatccgaatgaaagacagttaagttttgtgctgatgagacaacttagcggaaatgtaagtatcaaagttatgcatagagataacttagacttactaaagacagataatgatttacaactaacagaatccgaaatccgcaaagatttcgactgggcgtggcagtttagagaagaggtggtggaatgaaagaaaaaacaatttttatatcaaaaaaatatgcaaatgactttaacaatgacaaatataatttgtcctctggctattattttagaagtggtgaaaaacatgatattgctattgttaaatatggtgaaaaagattatttaaaaaatactgatttagcatatgttgtatgcgataagatcgttgacgcagactctataagcttcgtttatcatggtgaatatgaaacttggcattttaaactattaaacacagaagcaaattaaagtcccacgcaagcgcctaagagcctgcaatggctctgtgggtctacgagctggaatactcgttaaacttaccctggaagctttctgtaagtattcagctagcagatttggaataattagtctgctagttatagagcgaaatttttagaaagggaaatatcctccgacattttttcgtaaaaatctaaagtctgttatcgctcacagatgattatacaagcgtaatgctgcaaataaagtgctgacgcaaaactaaaaatttaatactcgacaatttaacaacaaaaataagtcagcagagaaatgaaaggagaacaataaaaaagccagctcacgtaagccagctccaatatatttgtctactaatattatatcataaggagtagcttgatgggtcgtaatcagacaaaagctgacattttattaaacgaattaagaataatcccaaaacttattaaagagcttgaacgtgataagattgcgagcaactcgctgctgtcaagtcctcagtggtcagacatgcgaacgagcggagggattagacaatcacaagaagataaaaacgtcagcttgattagtaaatgtgagtattacaacggacaaatacagacactagataaacgtaaaggcgagattgtcgaattaattatgcgtatacctgacatgctgcaacgtcatgtgttaattactacatttgtaaattgtcagacgtacgacgaagcgatcgacagattagagatgaatcgcaataactactatatgcttaagcgaaaaggtgtagaaagtctgaatttgatactaaataatactgaataatactatatcagtattagaaatgactgaataatactcacaaatactaatcaatgtcatataatagtattatcaaaatagcaagaagagataatcatttaccaactgactatttatttagtcgtcaactttaactactatcaaacttgctattttatgtatgtgggacgtacaggttcgaatcctgccgtctcagtagtggttatttcagccactagagcaatacagcgggcgtgggacatggatcggagttttaaccgtttttttgtgtagacctagtggtattaatcacgttcgattcgtgatgggtctataggcttactttaaaaataagcactggtatctctacggggacctttgcgccaagtaagactaaaccgttggaacatgaaccgtgattggaaaacggtagaggtagcgccttgataattggattgtcgacggtctgattatatgtgtcggttcgattccgactgttcctatagcgtgtattggcaacaaggttcaattccttgtgatgtaagtagctaacatctaggcgaagtggttcgaatccactcacacgctttactcagtcatcacattgtggtggctttttattacaattgtaagaggggatgttgcaaactgcgtgcagataaaaaaggtacccaccgggtcgcgttcgaaaaaaataaacgccggctgctaaaaaccgcccacctatgcggtatctgtggccggccagtagataagtcattgaagtatccacatccgctaagtgcagcaattgatcatattgttcctattgcaaaaggtggtcatccgtcatcaatagataacttacagttaacacattggcaatgtaataggcaaaagtctgacaagttatttatcaatcagacagccgtacgggctactgttgtaggaaatagaaacttacctcaaagccgagactggtcgtcctacgcatctaaagaataaatatgatgatttatattaagaagacttaaaatcgattagaattgattttaaggggcatatagaccctatcggctatgtggccgagcttcacgccgtcactgtacattttttctcgcgttaggatttagaattttttaaaggttggattatattgaaaaagaaatgtttaatttgtaaaaagactttccaagctaaaaccaacagaagtttatattgttcagaagaatgccgcaaaaagggcattcgtgagaaacaacgcaaattgatgaagcaaaaacgagccgataaaaagaaagagaaaattaaggttctaaatactaacgcagatgtgacagaaaagcctaaaaaaatacgtaatttggtacaacactataaaaaactaaagagggaaattttagacaatgagtctgaatttggttttacaggaatcgcgcttgttgagggtatagatattcacgaagaaaactttgtagatttagttatgcaaaaaataaaggagcaacaatgaactatatgggtatgggctatcttcagaggaagttagctctttttaagactggtgtagataaaagatatcgctattatgctatggacgacagagacaacacacgaagtattgtcatgcctgacaatgtgcgtgagatgtacaggtctgtgattgaatggaccgctaaaggagttgatagtctggcagatcgcattatttttagggaattcgctaatgatgattttaatgcttgggaaatttttaaagctaataacccggatatcttttttgatacggctattcaatcggcgctaattgcatcttgttgctttgtgtatattatgccagggaaggaagatagcctgcccaaaatgcaagttattgaagcgagtaaagcaacaggcattcttgacccgactacatttttgctgacagaaggttatgcagtcttagagtcggattcaaatgagaaccctacattagaagcttattttacaggcgaaaaaacctggtactatcccaaagatgagaaaccatatagcattgataactcgacaggacaccctttgcttgtccctgtaattcataggccagatgctgtacgtcccttcggacgtagtcgtataaccaaagctgggatgtatcaccaaaaggccgccaaacgtactttagagcgtgcggaagttactgcagagttttatagtttccctcaaaagtatgttctcggaatggatcctgatgcagaacctatggaaaaatggcgtgctactgtttcgacgttattagagatatcaaaagatgaagatggagacaaaccaacagttgggcaatttacaacagcaagcatggcccctttcatggatcatttaaaaatgtacgcttcattattcgcgggtggctctggacttactcttgatgaccttggtttcccttctgacaatccatcatcagtggaagccattaaagcagcgcatgagaatttaagagcggcaggacgcaaagctcaacgctctttctcttctggttttttaaatgtggcttatattgctgtttgtttgagagatgatttcccttatcttcgtaatcagttcatggatactgaaattaaatgggaacctctttttgaagctgatgcaaatatgctaactttggtcggtgatggtgctattaagcttaatcaagctattcctggtttcatggatgcagacgttattcgggacttaactggtgtaaaaggttctgacaatccaattccaaaagctacggaggtgacaactgatggttgatgatgtcttacctaagctactaaaatctgttcaacaggattttgaaaagcattttggcaaaagtgaggtcgttgctaaggcttttgcagaattgcaagctaaaaaagcgacttataagacagtcaacgagtttgctgtagaggttggacggcttttgtcgttggctctggcaaactctgttatttctgatgagttaccagatggtaaaatgtattataatattgctaatcgtctcgtgaatgatacactgagacataattataagttaatttctgattatgcaggcgatgtccagcaaaatttaaacaaacaggctaaaattagtttaaaaattcaacgtccaccgcttaatcaagataaaattgacgggttagtcaatcgtttggcgagtgaacctgtatttgacgatgtcaagtggcttctcgatgagccaattgttaattttagtcaatctatcgttgatgattgtatcagagctaatgctgatttccactttaaaacgggactgaaaccaactatagaacgtatatcaacaggtaagtgctgcgattggtgtgaccgattagctggtcgctacgtttaccacgaagaaccaaaagatttttacaagaggcatcaacattgtcagtgtgttatcgactatcatcctaaaaacggcaagcgtcagaattcatggtcgaaaaagtggacaaaagaaactactgatatactagaacgacgcaaacagatgaatattgacatcagagacaataaccgtaagtctgatatcaaagaatataaggaaatagtatccattttaggtacaaaagcccctatttctctagctaaattccaagacttgaagtataatgatggtataagatatgagcgattaaaagaccaagcacacatccaaggaaactttaaaaacggaagttggctagataaggtaaatcctgaaaaacaagctcggcatatcaaatcaaccgctggagaaggtaagagttatttcttcgatgatgtggataccgatgttttataccaaaagtataaacagactggtgaattaatcaagaatagaaggggacggactcataaggaacttattgatttaccagaagatatttcgataggtattgatatttactcaggaaatttagtaaatggcctgactattcattacggaaagaccggatcgcacattgttccaacttatcatgaaaggagagagtaatggaattattgcagtacaataataagaaaatttcacttgttgacattgatgatgagatatggactggaacagcatactattgcgatgctgatacaaatgagacccccgaggacgtcttagtcgtaaaaaacgagagaggatatacagaaatttctgaatcagaaatcaaatcaattgaaatcatttaataagcgcttagctagtgttgcaagtgctttttttatgctcgaaacaaggaggtggtttgtctcccagcgagagggttatcatgcagtacgattgaaaggaaaaaagtatggttactaagacgaaagcaaagcttggcaatcagcgacctactcaatcggtaaatttacattttgctaaaactctagctcatgaagccatcaattactacaaaaaaacaggtctaagttgctacttgtggcaagagaatatgctcatacctatgatggctatcaacgaagataacctgtgggtgcatcaaaaatacggctacgctattcctcgacgaaacggaaaaacagaagtcgtttacatacttgagctgtgggctttgcataaaggattgaaaatcttgcatactgctcacagaattagcacttctcactcttcgtttgaaaaagtaaaaaaatatcttgaaatgtcaggatatgttgacggagaagattttatatcaaacaaagccaaagggcaggagcgtattgagtttaaatctagcggttctgttatccagtttaggactaggacatcaaatggaggtcttggtgagggatttgacctactaattattgatgaggcgcaagaatacactgccgagcaagaatcagcgttgaaatacacggtaactgatagcgataacccaatgactattatgtgtggaacgccaccgaccatggtatctactggtacagtctttgaatcttatcgtaaagagtgtttaaaaggtgacagacgctactctggatgggcagaatggtctgttgacgaaatgcaaccaatacatgacgtaaaaagttggtatgttgccaacccgtccatgggataccacttaaatgagcgtaaaattgaagctgaattaggtgaggatgaaattgatcacaatatccagcgcttaggatattggccgtcatttaaccagaaatcagttatatctgaaaaggagtgggctaaactaaaagttgagcaagtaccagaactcaaaagtaagttatttgttgggattaagtttggccaagacggtaacaacgtatcattgtcaattgcagcaagagcatcagaaaataaagtatttgttgaggctattgactgtttatccgttagaaatggaactcaatggattattaactttttgaaatcggctgacattgctaaagttgttgttgatggcgcaagcggtcaagaattacttgctcaagagatgagagagcatggtttaaagaaaccagaattgcctaaagttgctgaaattatcacagctaacacgatgtgggaacaaggtatcatgcaagagactatctgccacaacgaccagccatctttgacagcggtagttacaaactgcgaaaaaaggcaaattggctcgaatggtggttttgggtataaatcgctttatgatgatagagacattagcttaatggacagtgcattgcttgcgcactggatttgttacacaacgaagccaaaaagaaagcaaagaaccagctgttaaaaaacgacatccggaagggtgtttttttactgctaaaaaatctaccgaactgccgggaaagcaggagaaaggacgttaatatgtcagaatttaaagttattgaaacacaagaagagttggacacgattgtgaaagctcgcattgctcgagaacgtgagaagtatcaagattacgaccaactgaaaactcgtgttgaagaactagaaaccgaaaacagcagcttacaaactgctttgaatgatgctaaatcaaacactgatagctatacagagaaaattaccactttggaaaatcaaatcgctggttatgaggcagcaaatttacggacaaaggtagcgttacagtatggcttaccaatcgatttagctaatcgtttgcaaggcgatgatgaagacgggctcaaggtggatgcagaacgcttagcatcttttatcaagccgtctcaaccacaaccgccaacaaagtcaaatgaaccgattattaccgaccaaaaagaagcaggttggattgaaatggcacgtaatttagttaacaaaggagaataaacatggcagaatcaattaaagcaggaacgttatttaaaccagaactagtaacagaaattatgagtaaagtgaaaggtcactctacgcttgcgaaattatctggtcaaacaccaatcccgttcaacggagtagaacaatttgttttcaacttggatggtaatgctcagattgttggtgaaggtgagcaaaaattagggaataccgcaaaggtcacttctaaaattattaaaccgctgaagtttgtttatcaggcacgtatgactgacgaatttaagtacgcctcagaagaaaaacgattgaatttcttaaaacattatgctgacggttttgctaaaaaaatggcggaggcttttgatattgcagctattcatggccttgaacctcgcacaatgacagatgcctcattcaaagctacaaactcatttgatggggtcgtgactggtaatgtcatcaaatacgaagcagataaaattgacgacaatattgatgcagctgttacaacgattgtagcaaatggaaatgatgtgacaggtatcgctttgtcaccacaggcaggacaagatatgtctaaacgaaaagataaatttgataatgtgatgtatcctgaatttcgattcgggcaacgtccaagcaacttctttaatatgactttagacatcaacaagacacttactatgaaaggtggcacagctaaagatgaccatgctattgtcggagatttccagaatatgttcaagtggggttatgctgaaaatatcccaatggaaatcattgagtatggagacccagatggctctggacgtgatctaaaggcttataatgaaatcctgctccgtacagaagcattcataggatggggaattttagatgagaaagcattctctcgcgttgaggtacaaggatgatttatagagacaaaaacacaggagcagtagtcgttactgactgtgcgctgttaggcgactgggagattgttcctaacacagtagataagacaccgacaagtgatgaaaaatcttggaccgttcaaactctgaaagaacatttgacagggctaggaattgagtataactcgtctgctacaaaatctgagttattagaattactccctaaataagaaagggaagtttatgacaaattttgcgacaacagatgacgtcattttattatggcgtcaattatccgttgacgaaatcaagcgtgctgaggctttgttagagactgtctctgacacgttgaggttagaagcaagtaaagtgggtaagaatctagatgaaatgattttggaaactccttactttgctactgtattgaaatcggtaactgtagatattgtagcgagaacgctgatgactgctacacaaggtgaaccgatgtcgcaagaaagtcaatcggcacttggctacacttggtctggaacttatttggttccaggaggtggtctttttattaaggatagtgagttgaagcgtctcggactaaaaaaacagcgatatggaggaattgagctttatggggaaattgaaaggaataacagttactttagtcgacaagacgattagcggaaaagaccctttcgggaacccgataaaagttgattttgatattaaaattgagaatgttcttgttgcaccggcaactaccgaagacatcaccaatcagttatctttgaccggaaaaaaagttgaatatatcttggcaattccaaaaggagataagcatgattgggaggataaagaggtttgcttttttgacaaaaagtggcgcactgtcggcctagctcttgaaggtattgaagagcttattccgcttgaatggaataagaaagttatggtggaaagatatgagtaagtttaaattcaagctcaataaagctggtgttgctgaattgatgaaatcatcagaaatgcagcaggtattaaccactaaggccacagccatcagagaacgttgtggcgatggttacgcccaagatatccatgtcgggaaaaatagggctaatgctatggtcagcgctaaaaccataaaggccaagaaagataactcaaaaaacaacacattgttgaaggcggtgcgatgattgattgaagtaattatcaaaaaatatttagacgagcatttagatgtgccgtctttttttgaacatcaaaaagatgaacctgcacgattcatcattttagaaaagactagcggggctaagcaaaatcatttgctaagttccacgtttgcttttcaaagttatgccgaatcgttgtatgaggcggctttacttaatgacaaagtaaagcaagtaattgagcagcttgatgtcttgccacaagtttctggtgtacatcttaacgctgactacaattttacagatacagcaactaagcgctatcgctatcaagctgtatttgacattaatcattattaaggaggaaatatggtagcaaattcatcaaacgttactacggctaaacctaaaattggtggtgctatttatactgcgccgctaggaacagaattacccaaagacacagcatcagagttaaatgaagcttttaagtcattagggtacatttccgaagacggcttatcaaacgaagataaacgagaatcagaagagatccaagcgtggggtggcgatgttgtagaatctgcccaaaaaagtaaagcagataaatttacatatacattgattgaagcattgaatattgaagtactcaaagaaatctatggcaaagataatgtaactggagaccttaaaaccgggattactgttaaatcaaattcaaaaccactagaggaacattgtttggttatcgagatgattttgaaaaacaatacagttaaacgtattgtaataccaaaagggaaagtatccgaagttggtgaaattaagtatgtcgacaacgaagcggctggttatgagacaacgttacaagcgtttcctgatgcggaaggaaacactcactatgaatatataaaaggagctggttaatgaaaacatcgtcaggttttgaatataagattgaagaatcgcgtttaaaaaattatgaattagtagaggcactagcggatttagaaagcaatccgctgtctttaccgaaagttctacgtttgttgctaggtgaccaagtagaaagtttaaaaaatcatttacgcgctagcgacgggactgtttcgacggaggcgttgatggaagaagtgaaagaaatttttgaaagtggtcaattaaaaaaataatagcccttgccacaatgctaaaaatggacgaagatgctcttgtctgtgatttagctgaaacttatcacatatatgattacaaacagctaccacctctaaaagtagctgttttttctttaggcttgagagaagaatcaagaatcaatcgagttatttcaggtaatagagtctcatttgaaagacgaatactagctgggatgtttgacagacttggaatgctcatttggatgaaaacgacagatggccaaaaaggtaaaaatagaccagaaatggtttcaacaatgtttgataatcaacagaaagatagtgaagttgtttcattcggcagtggcaaggatttcgaagaaactagaaataacattcttgggtttggaggtgatagctgatggctactaacttaggacaagcttacgtgcagattatgccgtcggctaaaggaatctctggatctataagtaagacgttagacccagaagcgtcaagcgcaggtagctctgcaggtagcctattaggaggtaaattgattgggatattggggagtgtcattgcagctgctaaaataggcgaaatggtcacaaaagcaatatcgtcatcaatttcagaaggagcggcgcttcagcagtcacttggaggagtagaaacccttttcaaaagcaacgcaaatttagtaaaaaaatatgcagacgaagcctataaaacaactggcttatcagcgaatgcgtatatggaaagtgtcaccggctttagtgctagtttgcttcagtcgctcggaggggatacggccaaagcggcaaaagtcgcaaatatggctatgatagacatggctgataactctaacaagatgggtacatctatggaaagtattcagtacgcttatcaaggttttgcgaagcaaaattacacgatgttggacaatttgaaactcgggtatggcggtacgcaagaagaaatgaaacgtttgctttcagatgcccaaaagctaactggaaaaaaatatgatatttcaaatctctcagatgtatatgaagctattcacgctattcaagggaaaatagggataaccggaacaaccgctaaagaggcagcaacaacgttcacaggttcttttgaagctatgaaagcagcttcgaaaaacttgttggggaaaatggctttaggtgaggatatcaaaccatcgctaaaagcgctgtttgatacaacaagcaactttgtattgaataactttataccaatgctaacaaatgtttttaaaggatttggttcggttatttcgttaactttctcagagctaatacctaaaattgttggttttatgcaaacaagcggtccgtcgctaatgcaatctggcattagctttattattagctttgttaacggatttctaacagcctatcctgcatttttaacagtggcaggaaaaatatttacagatttcgtatcttttgtaatgcaaagtatacctggactcttgcaagctggggctactctcgtcctgaatctaatagatggaatattagctaacttacctcaaatagcaacttcggcagtatctgtgatatcaagctttatatcaatgttgcaagcaaattacccggcaattttaaaaaaaggttttgaaattttaagttacttagtgcaagggattatagcaagattacctgatatcgttattactgttggaaaactcatagcgattttagcaggagcgatagcaagtaatctacctaaagtgctagctcttggagttcagttactcatcacttttgttaaagggattctgagtgtcataggtaaaataaacgaaacagctaacaatattggtgaaaagcttatcaatgcaatcaaatcgattgatttgttgagtgcaggtagagctataatgcgaggtttcttacgaggtttagaggatgtttggggagatattcaaaattttgtcggagatattgcagggtggattaaagatcacaaaggaccaataagttacgatagacgtttacttattccagccggcaacgcaatcatgcaaggtctgcatcaaggacttgttgataaatttaaaccagttaaaaacttagttaacggaatggccgaagaaattcagtcttcattcggaaatcctcaactagcttttgatatggatactaacgtaaacaatggctttgagcgaataggtactttaaataaaaatttatctagtcaagtgactagtacagataattacactagcggcaatgctgctttgttatctgccatcaaaaatttagccgatagacctattgttgtgtctgcgcaatttgataaaaatgaatttgccagagtcgttgctaagccaatagcagcgagacaaaaatttgacgaacagacagaagaaagactgagaggtataaacaggtggtagattacaaaactgtaagatgtcattttggcgatgtcgaattgactaagtggattactattacagacggctttactgtctttagtggcgcagactacgacccggagctaaaagaaattggtggcaaagatggtagcatttttattggaacgaaaactaagcataaagtaataaaagtcccattctgggtaaaatacaatacaatagaagattacgatgccctacaattggctttatcttctaaaaagcctaagatgttgatgtttagccacatacctggacgctattatttagctgtccaggttggggatttgaactttaaagaaatcaagatgaacggctttggtgagataacgtttatagttgcagatgcatatgctcattcaacgtcatacagacgcattaaagactatactcaagacggaaataaaatgaccttcaagattaaaaataacgggacagcccctgcgtttccgatatttagaattaagcacttgggtgaaaatggctatattggaattacaaatgagactggagcatttgcggttggttctcctgaagaagaagacgggactatcgttcatcgtaacgaaaccctttttgattactcaaaagcgattgcacaagctttagaaggtgcgcccaacgtcgcaaaactcaactatatgccaccaacatttgactcggaattaaagcgcatgcgccttgataatattttaggctctggcaaaggtggagagtatgtagctattggtgctagaggaactacaccgggttacggcgagcatgttggaacacggacatttattattaatcctgactcaaacggcgaatatactctcaatgaacacttgtggtggaaacagatttttattgctaccgcgcaggatcaaaaaggatttttaaagctttgcgtgacaggtgaaaatgatgaattcctctatgggattgaaacttacaaacgcaaaaacggctttgaaacagagtataacttttttgctcttgatgatgatggcgttggatggcgcttttataagcagtttgaattccaagcggatagaaattatcacaatcctttttcgatgaatagaagcagggcggttgagatttttagagaagaagataagtttcgtatttactttaacggtgcgcatcatcatgtaactgttccgtcccttaaaggaaaaaaatctcgcaagatacatcttgcgatggggacatgcagtgatagctctaaatatatcaactacaacctgtttgaaaaagtcaattttgaaaaaatgggagtgtctcattacaacaatattgtcaataagtaccaaccaggggatgaggttatcattaactttgaaaatgacactgtaagtacaaaagatatcgattcaatacaagatgtggtgttaggttctaagatgatttcgattccgccaggagagtcagaactagtcgtacacttgtctagctgggtcgcagcgctacctgatatatcaattgattttgaagagaggtacaaataaatgttaacaattcatggaccggatttaaaacctgtcctttttttggataatgataaacaaggagctttgaactactttaaccacaagtggtatagaaagcaaaagactggctcgtctgtactagaattctccgtttacaaaaaagatttgcttggcgatagcccacttagtcataaatatcacgtactaaacgatcaagcatttgtctcttttgtgcacaaaggtaaagtacaattgttaaacatcatgaaaattgatgaagatgaaaaacaaattgattgttattgcgaaaaccttaatttagagttgctaaacgagtattgtaacgcatataaagcaactaaagcgatgtcgtttgaagagtatctcgtgcagtttgacattttgagctggggggctttgacagttggcacaaacgaagttaaggacaaaaaacttacattggaatggactagtcaagaaactaagttagctcgtcttttgtcaattgctaataatttcgatgcagaaattgagtttgagacaaagcttaatttcaatcacacgtttaagcaactcatcattaatatttacaaagaatacgaggagggcaaatcttatggtgtagatcgtgataagaccgacgtgatattacgctatcaaaaaaatatttctgggataaggaaaacagttgacaagcgccagatttataacgctattagaccatacggcaaaaaaactgttagaggcgagcgcgttatttctaatcctgtaactcgtaaagtcactaaaacggttggttcaaatcgcacgtacttaggcggagaccttaaatattatggtcatacaatcaaaaaagctaacgtacaagctattattaactacgcagtgcaatataatattttgccaagtggaatcatcacgcaactttatttagagagtttttggggtgattcgacagttggtaaacgtgacaacaactgggcaggtatgagcggtggagcacagacgcgtccaagtggagtaaaagtcactactgggatggctcgtcctgcaaacgagggtggaacatacatgcactatgcaagtgtagatgactttttaaaagattacacttatcttttagcaaaacaagggatttataatgtcgtcggcaaaaagaatatagcagactatacaaaagggctttttagagctggtggagctaaatatgactatgcagcagcaggatatcaaagctacacaaatttgatgactaatatccgaaatggtatcaataaagtaactggaaatatcctcaatacgattgataagctgtggcagactcctgtaaagcccataaccgccgtaaacgtcgctagaagagccactaaaacaatacaagctattaatgaggctactaagctgaaagggcgcagaatcggttctggacagtgttatgcgctatctgggtggtatgcaaaaaaattggatggcgcttggattgacagctcgattggtggtattagaggtcgtatcggaggcggtatggctgctgccttaatcggcactgattataactggggtgcatatgggtggaaggtagataaatcacctaacgctggaaacttaaaagctggtggtatttataatgtacgagcaaatcgaggcgctcctttttataccacaggctgggggcatacaggtattatcaagagtgtctccaagaccagagttactgttttggagcaaaactttgttggtcgcatgtatgttgtcgaaaactcatatgacattaactctttcgcatctggattacaaacagtatgttaccctcgtgaaatagcgcaaggtatgtctgttaacggcgcaacaacacagcaagtaagtggtgggacacagatatcgtacgaagaagtcgtacaagaggctcagacagaatcatacgaagaagaacaaatcatctatattgacaactctatctacaaagagtggaaagatgaaaacggtaaagtagagtactatctcaaaaatggatttttgtacgcaccactttcaagagaccgctatccatctgttttaaccggtaatgagacacgagacaactggatacgaaaagacatggaagtcgagactgatagtcaagaagtcttgatgtcaacaggtctaaaagacttaaaagcacacgcatatccagcaattacatacgaagttgatggctatgttgacttagaacttggtgatgttgtgcggatacaggacgacggatacgagccaccgctgattttgacagcacgagtagttgagcaagaaatatccataacaaatcccagctctaacaaaactaaattcagcaattttgtcgaaaaagaaagtcagttagcttctgatttaatcagtgatatgttgcgtctatacgatgagtcaattccatacgaaatcaaactagctacttcgaatggtgtcgcttttaaaaatggcactggtgaatctgtcctaactcctagcttgcaaaagaacgggaaagactatgaagcagtttatttttataaaaatggtgactcgctaattgatatcggaccatcgctaatcgttaaagcaagcgactttaaccacgttttaaatataacagttgaggcatatttaaatgaggaacttgtagcaagcacacaaatatcatttacagacactgaagacggtgctgacgggaaagatggcgcaccgggaccacaaggacctcccggtgtaaacggactgcaaggtccaaaaggtgaccaaggcattcaaggtccagctggtgctgacggtaaagcgacttatacgcatatagcatacgcccttgacgagaacggatcaactggctttagtgtatctgataacgttggcaaaacgtacataggtatgtatgttgatgataatatcatagactcaaacgaccctaaaaagtacaagtggaatttgataaaaggcgcagatggtgctagaggtatccaaggtccagctggtgctgacggtaagacaccttactggcatgtagcgtatgcaaacagctcagatgggacagttgactttagcgtgtctgatagtgcaaacaagcgctacattgggcaatatactgactacgatgcaatagattcaagtgaccctaaaaaataccgctggactgacatggttgggacggttgtcgtcgggacaaacaatctgattgatggtacaaaatcattttttgggactgattggtttacttctgcaacgctagaagacgagaacctctctaattgtcctttcacgcttaaaaaatggattagtgggcaaaaagtgtcgcatgcaaaagatatcatggtcgagcaaggtgtaacgtacacttttagtgcttatgttaaacgtgaggtagctgggaatttatatttttatctttatgatatagcagatggttttattactagcgataccccacgagagacaattataaaaaacgttgactctagtctcagacgttttgaaatcacttttacaccaactaagacaggtaggattagaccaaggttcgcgatggtgtcatcggagcaaggtagtttcagctctggtgggtttatgctcgttaggggaaataaaacaggcgactggcaggaatcagaagctgataaagcaagtaatcttgattcaaaagctgatcaagaattaacccaagcacaaattctagctcttgaagaaagaactgctatagcaagagaaaatgcaattgctgaggctatgcagaatacactcagtgaagttgaaactaagtggaagctttggtatgacttaaatacgatagacgaaaagcaaaaagttgcaaacgacatcgctcaattgtttgatcgtacaactgagtttaaacaactattaggtgaggcaagtgcaagatttagctttatcaacaatgaaacgttgattggtgaagagggcgttgctatcggtgacaaaggcggaaaagcaaagttatttctatcaaatgacagcatttcatttgtgacaaatggtgttgctcagatgacattgacaggtgataccttaacaataaaaaatggactgtttacagagcgtatacaaattggaaattttgttgaagaagtctatgacagaaatccattatttaatgttatcagagcaattagaaatagttaggaggtgagacatgggaactgctacatatagtaggtcgtgggggaataacctgacacttgaaatattgtctgcttggaataagccaaatatcgcaagtaatacaagcacagtcaatgtacaagtttttttaaaaatgtctagttatggctatatttcaataggtgaaactagacctttaaaaataacagttgatggtagagctgagaccatcaatgttaatccatcgataaattacggacagagaaaactattatttgctaaagattacattgttaatcataattcagatggaaataaaccactattcaatatttcagcatattatccaataaactttagcaattatggtgaagcgactgcaaatcagtctatctcgctacctaaaattaatagacttagtgtatcaagtgctattagtggtgtgctaggtaatgcagtaactatcacaatcaatagatattcaacgtcatttactcacaatttgaaatatgattttaagggtagtacaggtactatcgcaactggcgttggtactagctatttgtggactataccgccaacgtttgctaatttactgcctaatgaattaactggtacaggtaatctgattgttgagacgatggatggatcagcaaagattggtgagacaaaatatactttatcaataacaatacctaatacagctacttataagccaaaattgtcaagtatcactctatctgatacaaatactttaactagtagcattgttagtggaaacaattttgttaggattataagtaaagttaaagttgattttggctcagctattggaaacaacggttcaacaataacaagttataatgctgaaattgtcgggaaaagtaactcaattatcggtaatggtagcgtatttgataaattggacttttttggttcagcaacaatcagagcaacggtaactgatagcagaggtctaacatcagaaccagttgacacaaaaattaatgtcattgattattttttaccaattgttacaagtgcaaaagtagtcaggtctcagcaaaatcctgacattttacaagtcttgccatttgttaagattgcaccaattatagttggtggaatacaaaaaaaccaactcaaaatgtcggtatctgttgcaccatacaatactggtatctatgcagttgatagtggcgcagctacaaatacctggtcaacaatttcccaaatgtcaggcgcccctttaaatcttggcggcacttatgacaagtcaaaatcatggcttgttaagatttcggtgagtgataacctaatgtcagcaacaccaataatacaaccagttgcaagtgagtttgtacttgtaactaaagcaccttctggtgttgcatttgggaaaatttgggaacatggcattattgatgccaaaggcgatgtttatgttgacggtactatttattgtggcgataaggcgatacagcaaaaaccacttgctttaaataatggtggctcttttagacatgacgacaccgacctaaatagcttgcaagacacaggtttttattgtgtatttagaggtgctaatagaccggctggggcaggtcctgggtacgtaacagttgtaagacatgagacagcaaactatgcttatcaacaattttacgaccgcacaaataaaactatatttacgcgcttgctggaaaacggtgtttggagcggttggagtgagtatgttaaaaaagatagcttacaaacgactggctggataacaattggcaacggttttaaatataagcggaaaggtgatgacatagacttgatgtataattttgcttctaatggattacagagatggtctgttggtaatatgccatctggtttaatacctcaagagttgatgtttgcgataactggatggacacttgctccagacaaatcaatccacttacaaatcaatgcatcgggattgattgagtgtataaatcctggcgcttactcaaatacttacagaggtgtcgtgcactggtcaatataacagtcaatataacaaaggagacgatatgtttacaattaacacaaaattcccacaagttcttgaggataaaagtattatgggagtgactgcaattgtgtcagttgatttaccacacgtgaaaggtaacttaacttttgatttaccacctgagtctgaaaataaatcttttgcagaaacgcttgaaaagtgtgagcagatattttacgacgaaaagtataaagataaagctcagtctgaaaaaatgactgaactaagtacatcaacatcaacaggcacacaaacacttatcaatctgataagtacgctttacgcaaaagaggttttaaaagatgaagatcttattgctattggttagaatttttttacaggaagaagggatagatatgatgattaaattatttgcgattgacttatattatggacgtatggcttggtcaagttttgttaaaaagggattttcagagtttattaataacaaaacaaaagagcaacttgcaattatgtgcgatgaagaattacttgctgaaattttagcaagttagtgaggtagtcggatgacagtagaacaagcagaaagaatcgctcaatcacaatttgtgtgggctattctctttatcttgctttttatgattgtggttggttatctggtgcgaacgtctgataagcgtgagaaaaagctaatggatttccatgaccaatcaaaatcagaatctaacaaacgtgaagagtggctcaaaggtcacttagataaaaatacagaacagttacaggacatttctcagaccattggtgttgtccaaaaggagatgtcttatatgagtgaccgcattggtcgtctagaaaaagaggagaaataagatgaacgaatttataacacaaatcattacagtatcagtaccaatttttggtatcatcgcaggtattctcacgcacaaagtaaaaaaattacttataaaaaaaggtggagaaaaagctgttaaaattgcagaaattgtcgctcgtaatgctgttgaggcagttgaacaaatatctgtggaagttggtattaagggacaagataagctaacagaagctaaaacagctgttattgatggtttatcgcaatataatatcagtttaacagagactcagttagaaacatttatcgaagctgcggttaaacgcatgaatgatgagtggaagaaaggtcaataatatggtaattaatattgagcaagctatcgcatggatggcatctagaaaaggtaaagttacttactcgatggactatcgaaatggtccttcatcttacgattgctctagctctgtctattttgctctacgctcagcaggcgcatcagataatggctgggcagtaaatacagaatatgagcacgattggttgataaaaaacggttatgttcttattgcagaaaatactaattggaatgcgcaaagaggtgatatttttatttggggtaaacgtggggcttcggctggagcttttggacatactggtatgtttgttgatccagacaatattattcactgtaattatggttataactcaattacagtgaataaccatgatgaaatctggggatataatggtcaaccttatgtttacgcttatcgttacgctaggaaacagtcaaatgctaaggttgataatcaatcagttgtatctaaatttgaaaaagagttagacgttaacacaccgctaagtaattcaaatatgccatattacgaagcaacaatttcagaagattattacgttgagtccaagcctgacgtcaatagcactgataaggagttgcttgttgctggtactagagttcgagtttacgaaaaagtaaaaggctgggcaaggataggcgctccacagtctaatcagtgggtagaagatgcttacttaattgatgcaacagatatgtaaaccaacagagcgacataaatgtcggtagcaaaaaattatggaggtaaaactccttaagataagacaaatgccctcgctttgcgggggctgtttttgttatcaatagtgaatgcaacaaaattttttcaacaatatattgtgctaaaaatgtatttttatatataatcatccaatatgttgtggttgcttgaatttataaatttcaagacacgattttgtggcttgacattatttttaaaaaaagtataattatcttaacaagacaaaccccccattcctttataggcagatacgttctgatatggggctttttttatatcgttaggagagttatgaaacaacctttagctttgacatgggaagatcaaattagactacttgaaaaacgtggattaattgttaaagctgatgatgtagagaaaatcaaacatatcagttattatagaattaaagaatttgcaaaaccacttgaaataaagcaacaagatggtgaggagcaggatattttatatgataatattgagtttgcagaagttttggcaagatattatcaggataaaaacttaagaatctatctactgcacgctattgaaaaaattgaagtgtctattaaaacaaaaatttcttttgttttgggggatagatatggggcgttcggatatttaaatttctcttcatgggctaataggaataagtttacaaaatatgatattgaaaaaagacaatttaggattaaaaagaatttattgaatactgtaagaaaatctcaactaactgagttacaaaaatcaattaaccttgatctagatggattcccaacagtgtggcttgctattgatttattgatgtttggtgacatcgtttcaatcttaacaatcatgagtgagaagaacattaaacagatttgtcaatattacagttgtacaccagaagaacttgtttcgtggcttaaatgtttgaatttcataagaaatgtatgtgctcataattcaaatgtactggatattcaaatcacaacaaagcctaaacttcgttcagaatggagaaattatattgatacagtaataattaaacataacgtgactaaaccttctaataagttatccgttattattgctattgtagtctatcttgtaaatactattaattccaaatatcaatggagaaatatacagtctagtttgaaggctctttgtaaagaagatgacagtagggcaaagcttttaggttttaaagattatgattctgttaaagcaatgattaatgggataaagtgtactacttttacaaattcaaaaaaatagaaatttttagcaagaatcgcctgatactagctgttcttgcttttttatttgctaaagaaagatatagatgttataattaataaaaataataaggagacacattatgtcacaagaaaaactaaaatcaaaagttgaacaagcatcaggtagcctaaaagaaggagctggtaagctaactggcgataaagagttagaggcaaaaggttttgtcgaaaaaacaattgctaaaggtaaagaactagcagatgatgctaaagatgctgttgaagaggcagtagatgttgtcaaagaaaaactgaaataaatattaaccgctctctattgagggcggtttttttgtgtgtctagagtttgctttcaattaattgttttaattctaataagtcttcttttgtagcatttttgttaataaaactacgagcagtagatcgttttgatagataggttctatgttctctattgttttctgcccactttttatttgctttttcttgaggtgttaattctttatccatttcaatcatccttgttaataaagtaaaatacaactaaacaaattgcgaaaataatcaaatatttcatatttgtcttagatatgatatactatcagtagtggcaaggggcttgagccccaaactactactagaaccttatttgaatctccgtggccggtttttctttttaggttctttttttattgctgtgattatgcttgctataccaaccaacagagttccgattgaagtaagcaaatcagcaatttctgatattctcatatcttcctcctttctatatataattatagtacatgtactatataaagtcaatacttttttttaaaatatttatctttttgtctatcagaacagaaaaatttaaaattgtctatttttaggattttttatcgaatagatagataggaggataaaatatgttatatatagatgagtttaaagaagcgattgataaaggctatatttcagggaacacagtagcgatagtgcgtaaaaacggaaagatatttgattatgtgttgccgcacgaggaagtgagagatgatgaagttgtgacagttgagagtgtagaagaggtgttgagggaattgaagtgaaagggtgcaaaaaaggggcaaaatagattaaaaatgaaactacattgaactttttactattataaacaaccattaaatcaacgcttggactattatgaactattgtgtacaatagtagtagattccggcaggggacatattcattgcatgtaaatagcggtttagagctattttgccccaaatccgccccaaatttctctgattaagtttatcgttcctatctttttgttcttgtaattgatgtgcgtaaacttctaaagtgatatttaaattctcgtgatctaaaacttgagagatggaaattagatagcttgcaaatgtatgcctgagagagtgcactcgtacctcgcgaccagttatttttcggatagttttattgactgcattatttgaaagtttgtcgaataatctgtcgtttttattttttgtaaattcatgcaaaaaaaataatgtatcattgtcaattggtatatttctgatactacttttgttttttgttggcaggtatctttggttgaaatgataatcccaagttttattaattgataaatatttgttagtgtaatcaatatcattaactgttaaacctaaacattcagcgaagcgcatgccagttttagcgatgaggtataacgctgcatacgattgatgttgtgatttttctttacaaatttttatcaagcgtaagtattcattggtttcaagaaattttatctctatttacgccccttattttttgctttaaccttagtgaataaacaaaaatttttttctatatatccctcgtgaacagccatggatacgcaggcttttacatgtatgttaaaacgctttactgtatcttgcacatgcgtttgactataatgatttatgacttgttgatatttagtggaagtaatattgcaaagtaatatatttcctattatatgtttatacgatattcgatattcccacccgttgtcgcgtttacggaaatacgccattgatatactccacattagctaaagaacagggtgttcaaggctaccttgatggaaaaggctctcttagagatatttgtaaatggtatgatatctcaagtcgctctgttctccaaaagtggataaaacggtatactagtggtgaagacttgaaagccactagtagaggatatagccgtatgaaacaaggaaggcaagccacatttgaagaacgtgtagagattgttaactacaccattgcccatgggaaagactatcaagcagctattgagaagtttggtgtttcctaccaacaaatttattcttgggtgcgtaagcttgagaagaatggctcacaaggtttggttgatagacgtgtgaaagggttggagagtaggcctgatttaaccgagattgagcaactttaactcaagattaaacaattggaggaacgtaatcgtctcttagaaatcgaggttagtttactaaaaaagttagaagacatcaaacgaggaaacagacggtaagactaggtaagcatttagcggagttccaagtaatcaagaattattacgatgaggaatctaatgtgcctattcaggccttatgccaactcttgaaggggtctcgttcaggctattacaagtggctcaatcgtcaaaaaacagattttgagacaaaaaatacaaagctaatggctaaaatcaaggaacttcatagactctacaatggtatcttaggttatcgccgtatgacaacatttattaatcgtcaacttgggacaacttaaaacaagaaacggattcgttgattgatgaacattctggggattagttcagtcattcgtcgtgttagccatgcttgtacaaaagctggtgacagattttacgaagaaaatattcttaatcgtgaatttacagccacagctcataaccagaaatggtgcacagatgtcacctatcttcaatacggtctgggagctaaagcttatctcagtgcgattaaagacctgtataacggttctattatcgcttatgagattagtcacaacaatgaaatccacttgttatgaagaccattaaaaaggggctagagctcaatccaggagccacacctatcatccatagcgattgaggtagtcaatatacttccaaagaataccgttatatcatacaacaagctggtctgaccttatccatgtcccggattggcaaatgtattgataatgcaccaactgaaagtttctttgggtttttcaagactgagtcttaccaccttaagaaatacaactcttatgatgagttggtcaatgatgtggcacgttatatcgaattctacaacacacaacgttatcaatcaaaattaaacaacctgactcctctagaattcaggaatcaggttgcataacttatcttttattatttgactgtctacttgacagggagccgttcagattgcttaacctttctaaatttgctaaaatagctacaagaaaacgagccatttaatgcttatttcttatactgtcttgcctcacgctctcctcgaccaaaaattgagcgtgaggctttttgtttcattaaacgatgatatttccatattcatcagtttgttttccgagagccatcaaagcttcgataaggtcgataattccaggaataaaggtaatactaaaaataatatataaaaaaacctggcctatttttcctgcgtaaaatttatgcgctccaatgccgcccaaaagaacgttaataaaacataaactactatgttagcataagactttatttttacaactgaatttcatataaatggattagagtaagggataaaagaaattagcatagctcttttgaaaataaaaaaattaatataatatggaaaaaattttatttcataaacgtttcataaaaggtatgtaatctagtatttaggcaacactattttgtcactggtgtctagtaacttatagattgataattttactagtaaacgtaattcttcgctttaagagttaaatgtctatttattgtaagctaaattgggaggtgaacttatgtaaaattagataggtactgtcaagtacgggatgattattgaaacagccagtatgcatcataaaatctgtattgcttaataactatttccttaaccagacatcagttcattgtttatcatcgctaccctaagtctagttttttcaatagagcattaggtagtttttgataataaaactatataaacatgagaattagatttcgtatcgcattcttcataatgagttatttgagattttcctttgaataaatagatacgaaattcagtaacttcatatataaacggctctatcattgagatagtttgtcaaatgaagaaattttaatggaaatagttttaaaaacattagttgtaggcgatgtaaaaatattaatccagtggatgcaatagttgcggagtaaaaatagagaggagtaattaggaagtgataaaaaatgctatagcatatattaccagaaaaaaaaatagaacacttattatatttgctattttaacaattgttctttcttgcttgtattcatgtttaacaataatgaaatcaagtaatgaaatagaaaaggctttatatgaaagttctaattcttcaatatcaattacaaaaaaagatggtaaatattttaatattaatcaatttaagaatattgaaaaaataaaagaggttgaagaaaaaatatttcaatatgatggattagcaaaattgaaagatcttaaagtagttagtggtgagcaaagtataaatagagaagatttatctgacgaatttaaaaatgttgtttcactagaagctacaagtaatactaaaagaaatcttttatttagtagtggagtatttagttttaaagaaggaaaaaatatagaagaaaatgataagaattcaattcttgttcatgaagaatttgctaaacaaaacaaactaaaattgggtgatgaaattgatcttgaattactagatacggaaaaaagtggaaaaataaaaagtcataaatttaaaattataggaatcttttctggtaaaaaacaggaaacatatacaggattatcatctgattttagcgaaaatatggtttttgtagattattcaactagccaagaaatattaaataaatcagagaataatagaattgcaaataaaattttaatgtattctggtagtttagaatctacagagcttgccttaaacaaattgaaagactttaaaattgataagtcaaagtattctattaagaaagataataaagcattcgaagagtctttagagtcagtgagtggaataaaacatataattaaaataatgacttattcgattatgttaggtggaatagttgttctttcattaatcttgattctatggttaagagaaagaatttatgaaataggtatatttttatctattggaacaactaagatacaaattataaggcaatttatatttgagttaatattcatatcaataccaagtataatatcctccttatttttagggaatctactattaaaagtaattgtagaaggatttattaactcagagaactcaatgattttcggtggaagtttaataaataaaagcagttttatgttaaacataacaacacttgcagaaagttatttaatattaataagtattattgttttatcagttgtaatggcctcttcattaatattatttaagaaaccaaaagaaatattatcaaaaataagttaggagcaaataatggatatattagaaataaagaatgtaaattacagttacgcaaattctaaagaaaaagttttgtcaggagtaaatcaaaaatttgaacttggaaagttttatgcgatagtagggaagtcaggaacaggaaaatccacacttctttccttacttgcaggacttgataaagttcaaacaggaaaaatcttgtttaagaatgaagatatagaaaagaaaggatatagtaatcacagaaaaaataatatatctttggtatttcaaaattataatttaatagattatttatcgccgattgaaaatattagactagtaaataaatcagtagatgagagtatcttgttcgaattaggtttagataaaaaacaaataaaaagaaatgttatgaaattatctggtggtcagcaacaaagggtagctattgctagggcactggtatcagatgccccaataatactagctgatgagcctaccggtaacctagacagtgttactgctggagaaataattaatatattaaaggaattagctcaagatagaaataaatgtgtaatagttgtaacacatagtaaggaagtagcagattctgcggatatcattttagaactaagtggtaaaaagttgaaaaaagtaaataaaatgaatttggaggttgaataatgataaaaaatgcatttgcttatgtaactagaaaaagcttaaaatcattaattattatattagttattctatcaatggcaactttaagcatcattagtttatctattaaagatgccacagatagagcttctaaggaaacatttgctaatataacaaacagtttttctatggaaataaatagacaagtaaatccaggaacacctaggggtggaggaaatgtaaaaggtgaagatattaaaaagatatctcaaacaaacagtatagactcctatgtaaaaagaataaacagcgtcgcagacctagttgatcatgatataattgaaactcaagatacacttgcaaatcaatcacctgaaagagcaaagaattttaagagaacagttatgttaacaggggttaatgactcagcaaaagaaacaaaatttgtatcagaagcatataagttagtagaaggaaagcatttagaaaataaagataaaaataaaattttaatgcataaagatttggcaaaaaaaaacaatctcaaagttggagataaaataaaaataaaatctaatttgtttgatgctgacaatgaaaaagttgcaaatgaaactgtagaagtagaaattaaaggtttatttgatggtcataatagcggtggggtaagtgcagcacaagaactatacgaaaatacactaatcactgacgttcattcagctgctaaagtttatggtaatacagaagatacagccgtataccaagatgcaacattctttgtaaaaggtgataagaatcttgatagtgtaataaaagatcttgggaaactagatataaattggagagaatataatttgattaaaagttcatcaaattatcctgcgctgcaacaatctatatccggtatctattctatttcaaacaaattatttgttggctcattaatatttgcaggagttgtagtttcattattacttttcttatggatgaatgccagaaagaaagaaatagcagtattactatcattaggtatatctaaattagaaatttttggtcaatttataatcgagatggtatttatatccattcccgcacttcttggatcttatttcttagctcaatatacagctgataagctagggaataatatattgaataaagttactggcgatatagctaaacaaatagctagacaatctgcatctagtcaattaggcgggggggcagaagctgaaggattcaacaagactctttcaggtttagatataaatgtattacctaaattcataatttatgtagttatatttatgagttttgtacttcttgtatcattgattctttcttcaatttatacattaagaaagaatccaaaagagttattaattgataataattaaaattttcggtgatttatatcaccgaatgttttttgacttataaaaatcaaataatatactgtataatattatgtatagatttaaatggaggtatctatgaaaatattaactgttgaagatgataagttgataagagagggaataagtgaatacctttcagaatttggatatactgttattcaggctaaagatggaagggaagccttgtcaaaatttaatagtgatataaacttggttatcttagacattcagataccttttataaatggtttagaagtgttgaaagaaattagaaagaaaagcaatttaccaattctaattttgactgcatttagtgatgaagaatataaaattgatgcatttactaatttagtagatggatatgtagaaaaaccattttcattgcctgttttaaaggctagaatagattctttaattaagaagaattttggacatttagagaagtttgaatataagaatctttcggtaaattttaatagttatacagctaaaataaatgatgaaaaaatagatgtaaatgcaaaagaactcgaaatactaaaatgtttattggataatgatggacaagttttaacaagaatgcaaattattgattatgtctggaaggatagcgaagagatcccttatgatcgagtagtagatgtatatataaaagaacttagaaaaaaattacaattagactgtataactactataagaaatgtaggatataaattggagagaaaatgaagaaattaaaaatattcccaaaaatgttcatacaaatattttctattcttggaatactaattatattagttcattcattattcttttttatctttcctaaaacatatttggagacgaggaaagtaaaaatccacattatggcagatgaaatttctaaaaatatgaatggaaaagagttaaaatatttagaccaaactttggagctttattctaaaagtagtgacataaaggtatttataaaaaaaaataataacaaaaatgaattacaaataaatgataatataaatgttaatgtaaaaagtgatagtaattctttaataattgaagaaagggaaattaaacttcatgatggcaaaaaaatacatcttcaatttgtttcaacagctgatatgcaaaaagacgcgaaagacttgagccttaagtttttaccatattctttatcgatatcatttcttttttccattgttatttctttaatttatgctaaatctataaaaaacaatatacaagaaataactatggttactgataaaatgataaaacttgacaaagaaacaagattgaaaattagttctaatgatgaaattggacaactaaaacagcaaatcaatgacttatattgtgctttattgaatacaattaatgatttggaatttaaaaataaggaaattttaaagttagaaaaattgaaatatgatttttttaagggggcgtcccacgaacttaaaactcctctttccagcctaaagatattacttgagaatatgaaatataatatcggaaaatataaagatagagacttttatatcagtgagtgtattaatattgtagataacttaacaaagaatgtctcgcaaatattatctttttattctataaaagacttgaataatgatgaagaatatttaaatgttggtgatacattagatgaagtattagaaaaatactctatcttagtaaatcaaaaaaaaataaatattaataaggaattattagactataatatttatataggaaaaacggcactaaatattgtattttctaatttgattagcaatgcagtaaaatatactaatcgaaatggaataattaatatcaaaatagctaatgattggttacttatagaaaactcatatgataaaaataaaatttcgaaaataaataaaattttagatgctagttttgatctaaaattggataatagtaatggattaggattaaatatagtaaagaatatacttaataagtataatataaagtatgaaatattacatggtgaaaattattttatatttaaaataaaaataatctcttgagtaataatcatactattggactaatgtcaaataagtagacagaaaaccgtgttattttattgcgttaaaataattttcttctttctgattaggggttagtcctagattagccgtatgtgggatgtaattgttataaaaattctcaatgtattcaaagcagtctaattgaacctgtttgatattttgataatttttttggttgatttgtctatgctttaaatacttgaaaaatgcttcagttacggcattatcataaggatatctaggtttagaaaaagaatgcatgatattgttgtcatcaattatttttctaaattccctggccttaaattgtgacccttggtcggaatgaaagagaagtgttccttcaatctttcttttattaagagctaattctagagtgtcacatgctaactttgcatccatacgatgactcaatttccaagcaatatattttctagaatagagatcaattattgcgcagagatagacatatttcttatatccaatagaaatataggtgaagtcagtagaccatacttgattaggtttatcaggattaaatttctggttgagtaagttttgaggatacgttttttgagtctttttaagagctgtttttgtcttaacggtagccattttagggagcgccatattcttcatcagacggtaaattcttccttcagagatttttgtgtcttttaaaacaggttataacacacaaagtgttgtctatttttatagtatacatccatactcgcataaccatgagataatcactaaaacaagagtcgcctgacactagcgactcttgtttttatttgctaaagaaagatatagatgttatgattaataaaaataataaggaggtgcagtatgtcacaagaaaaactaaaatcaaaattagatcaagcaaaaggtggtgctaaagaaggctttggcaaaataaccggtgataaagagttagaagcaaaaggatttatcgaaaaaacaattgctaaaggcaaagaactagcagatgatgctaaagatgctgttgaaggggcagtagatgctgtcaaagaaaaactgaagtaacaaataaccgctcatttaacgagcggttatttgttatctttttgtctatcagaacagatatagatgagtttaaagaagcgattgataaaggctatatttcagggaacacagtagcgatagtgcgtaaaaacggaaagatatttgattatgtgttactacacgaagaagtgagagaagaagaggttgttacagttgagagagtgcttgatgtactgaggaagttatcataataacggaccaaaattcgccccaaaaagtattttaaaatagaataaaataaaaaaatatgctttttattatggatgtatcgtgtattttaacctttaatatatcctattttaatggtagagaagttggcaggggacatattaaaaccttttttgagatgttaggaaggattttattctttagactagtgttgagaaaataacaaaacttaaataatcttatttaagttttgtttaaggtgaactttgtatactttaaatatcctaaataaacttttcttttcatgttctttgttttactgatgaagaacaatctcctaatatttgcaactcataatgatttgagttgcattttttattgcaaaaaatataagtcagattctgaaaaaatgttataataattaccatgaataaaaaaggaagtcctatgtcacaaaaatcaaactattttaaagggcaaattgattatgctgttgtgataccagtattttttttattaatgattggtttagcctcaatttatgttgcaacgatgaatgattatccttctaatatctatatcgcgatgtttcagcaggtgtcttggattattatggggtgtattattgcatttgtcgttatgcttttcagtactgaatttttatggaaagccacgccctatctgtatgctttaggactaaccctaatggttcttcccttaattttttatagtccacagctttttgcggcaacaggtgctaaaaattgggtgaccattggctcggtaactttgtttcaaccgtcagagtttatgaagatttcctatattttaatgttatctcgaataactgttagttttcatcagaaaaatcgcaaaacttttcaagatgattggaagttgctaggattgtttggtttggttacattgccagtgatgattcttctaatgttacaaaaagatttaggaacagcattagttttccttgccattttgtcaggtttaatccttttatcgggcatatcttggtggataatcttgccaattttatctactatcgttctttttatagctagctttttgatgatttttatctcaccaaacggcaaggaatggttttataatttggggatggatacatatcaaatcaaccgtttatctgcttggattgatccatttagttttgcagactcaattgcttatcaacaaacacagggtatggtatcaattggaagtggcggggtaacaggtaaaggttttaatattttagagctctcggttcctgttcgtgaaagtgacatgatttttactgtcattgctgagaattttggcttcattggttcggcgattgttttagggttatatctcattatcatttaccgtatgttaaggatcaccattgaatctaataatcaattttatacttttatatcaactggttttatcatgatgattgttttccatgtttttgaaaatattggtgcagcagttggtatattacctctaacaggaatcccacttccgtttatttcgcaaggtggaagttcattactaagtaatcttattggaattggattggtcttatccatgtcttatcaaaatacagttcgtcaggccaaggctaatggatcacatttgaagtatcgtagtatataacaaaaaaaggttggaaagataatccagccttttaataatcgaaatattttagaggagtgagttaattaagtaaggtggtagctataaaaaatcgtaataatatgatataataaagggtatgaattatcatgattatatttgggatttgggtggtacactacttgataattacgaaagttccacacgtgcttttgtagagactttgaaagaatttggatatcaagcagaccacgatagtgtgtatcaaaaattaaaagagtcaacagcagatgcaattgcatattttatccctgaagaagctgattttttaaaagagtataaggctaatgaagctaaggttttggaaacaccaattctattccaaggggcaaaagaacttttagcgaaaattcaaagacaaggtagtcgtaattttttggtgtctcatcgtgataatcaagttatagttattctggaaaaaacagaaattattgactattttacagaagtagtgactgctgataacggcttttcaaggaaacctagtcccgagagtatgctttatttgaaagaaaaataccaaattgataattgtttagtaataggcgatcgtgatatagataagcaagcaggagaatcggctggttttgataccttattagtcgatgggtcaaaatcattgatggagataatagagtaaatgacagaagaaacaaagaatatggaacaacgtgctcaagaatatgacgcaagtcagattcaagtattagaaggtttagaagctgttcgcatgcgtccaggcatgtatatcggttcgacttcgaaagaagggcttcatcaccttgtatgggaaattgttgataactcaattgatgaagccttagctggatttgcaggacatattaaagtttacattgaaccagataactctattacagttgttgatgatggtcgcggtattccggtagatatccaagaaaaaactggaagaccagctgtagagacagtttttacagttctccatgccggtggtaaatttggtggtggcggatacaaggtttctggtggcttacatggtgtagggtcatctgttgttaatgcattgtcaacacaattagatgtcaaggtttataaaaatggcaaggttcattatcaagaataccaacgcggtgttgttgttaatgatcttgaaattatcggtgatactgacttatcaggaacaacagttcactttacgcctgacccagaaattttcactgaaaccactgtatttgattttgataaattagccaaacgtattcaggaattagcttttttaaatcgtggactaagaatctccatttcagacaagcgagaaggtcaagaagttgaaaaagaatatcactatgaaggtggtataggttcatacgttgagtttatcaatgagaacaaagaagtgatttttgaaaatcctatttatactgacggtgaattagatggtatttcagttgaagtagcaatgcagtatactactggatatcaagagactgttatgagttttgcaaataacatccacactcatgaaggaggaacgcacgaacaaggatttcgtactgccttgacacgtgtgattaatgattacgctaaaaagaataagattctcaaagaaaatgaagataatttaactggagaagatgttcgtgaaggtttaacagcagttatatctgttaaacatccaaatccacaatttgaaggacaaactaaaacaaaacttggaaattctgaagttgttaaaattacaaatcgtctctttagcgaagctttcaatcgattcctattagaaaatccacaagtagctaagaagattgttgaaaaaggaattttggcatctaaagcccgtattgcagcaaaacgggcgcgtgaagtaacacgtaaaaagtcaggcttagagatttcaaacttacctgggaaactggctgattgctcatctaataatgctgagatgaatgaactttttatagtggagggagattctgcgggagggtctgcaaaatcaggacgtaatcgtgagtttcaagcaattttaccgattaggggtaagattctaaacgttgaaaaagctacaatggataaaattttagcaaacgaagaaatccgaagtctcttcacagctatgggaactggatttggtgcagattttgatgtatcaaaagtcagatatcaaaaattagtcattatgactgatgccgatgttgatggagctcacatcagaactttacttttaactctgatttatcgttttatgcgacctgttttggaagcaggatatgtttatatcgctcaaccaccaatctatggtgtcaaagtaggaagtgagattaaagcttatattcagccaggggtcaatcaagaagaggaattacgtcaagctctagatacctatagttcaggacgttcaaaacctactgtacaacgttacaaaggtctaggtgagatggatgaccatcaactttgggaaacaacaatggatcctgaaaaccgcttgatggcacgtgtctcagttgatgatgcagcagaagcagataagattttcgatatgctaatgggagatcgagtagaaccacgacgtgaattcattgaagctaatgctgtttatagtaacttagatatctagtccaaagatagctttgaaaaacagttcaagtatgctataatcttaacgttatagtagatttttagaaaattagaccattataaggagagttgaatgtcgagcggaatcatattgctgcttgtggctatagtcctgcttgtgattattgcctacgtagtcggcgtcgtaataagaaaacgtaatgatacattaattgcaaacttagaaactagaaaacaagagttagttgaccttcctgtgcaagaggagattgagcaagtcaaattgcttcatttgattggccaaagtcaatcaacttttagagaatggaaccaaaaatggactgatttatcaactaattcatttaaagatattgattttcatttagttgaagctgaaaatcttaatgattcatttaattttgtgcgtgctaagcacgagattgataatgttgatagtcagctaactattatagaagaagatattgtttcgattcgtgaagctttagaagttttaaaagagcaagaagagaaaaatagtgcccgtgtaacacatgctttggacctatacgaaacacttcaaaaatcaatttctgaaaaagaagataattacgggacaaccatgccagaaattgaaaagcagttgaaaaatatcgaggctgaattttcacattttgtgaccttaaactcaactggtgacccgattgaagcttctgaagttttgaataaagcagaggagcatacgattgctttagggcaaattacagaacaaattccagctattgttgctaaattagaagacgattttccagatcagttagatgatttggagacaggatatcgtcgtcttttagaggaaaactaccatttccctgaaaaggatattgaacaacgttttcaagaagttcgtgaggctattcgttcgaattcagatggtttagttagtttggatctagatcgtgctcgcgatgaaaatgaacatattcaagaaaaaattgataaactttatgatatttttgaacgtgagattgctgcttataaagtagctcataaggatagtaaaattattcctcaattccttgctcatgcaaaatctaacaatgaacaactggggcatgaaatcaaacgattatctgctaaatatatcttaaatgaaaatgaaagcttaagtttacgttccttcacaaatgatttggaagaaattgaaacaaaggttttaccttctgtagaaaattttggtcaagaagcttcaccttatactcatctacaaattttatttgagcgtacgttgaaaacattgactactgttgaagaaaatcaaatggaagtttttgaagccgttaaaactattgaaagcgttgagacacgagcacgccaaaatatggataagtatgttaacaagctccatatgattaaacgtttcatggaaaaacgcaatcttccaggaatcccgcaagacttcttaagcactttctttacaacaagttctcaaattgaggcacttattaatgaactcagtcgcggtcgtattgatattgaggctgtttcacgtttaaatgatgtgactacaaatgctatcgctaatttagagcaagctacatatctagttgttcaagatgcgactctcacagagcagttactacagtattcaaaccgttatcgtagttttgaacaaaatgtgcaaaagagctttgaacaagctttgtacttatttgaagttgaacataactataaagcatctttcgatgaaatttcatacgcacttgagactgtggaaccaggtgtaactgaccgttttgtgacgtcttatgaaaagacacaagaacgtattcgtttctaaaaaagaagagttagtactcttctttttttaattgctatctatgaaaggtgctaattttaaggtacaatagtaaaaaagttttggaggttttaaatgattaaaggtttgttagtcatggacgttgattcaaccttaataatggaagaagctattgatttattagctattgaagcaggggtggggaaacaggttgctgcactgactgacgctgcaatgcgtggcgagttagattttgaagaagctttgaagaaaagagtagcgctacttaaaggtttgcctgttactattttgacagatatattatcctcaatacattttactccaggggcttatgaattgattaaagagtgtcacaagcgtcagatgaaagttggtcttgtatcaggaggttttcacgagacgattgatatcttagctaagcaattacaagttgattatgtcaaagcgaatcgtcttggtgtcaaaggtggttttctcactggcgaagttgagggagagattgtcactaaagaagtgaaaaaaataaagttaaaagagtgggcttctgaaaatcacttagacctttcacaaaccatcgcaatgggagatggtgccaatgatttaccaatgatcaaatccgctggggtaggaattgctttttgtgcaaaaccaattgtcagagaagaagctgcgtatcagattaatgaaaaaaatttgcttaaggtatttgatattattgatgcaaatgaaaactaggcctttattaagcctagtttttagattaaggattttaagagttttatttgagagggtattaatttgtttttagataaaaataaatcaatatattctggttttaaccagatatagtcaacggtctctccttcttgcaatgtaattatatcttttgcaccattgtattttgcgataaaatggtctacaaagtaagaacgctcagagaaccactctctattaagaaaggttagacattgaggaacgataccagtttcttctttgagttcccttagaatagcttgcttagcattttctcctttaagggcagatccgccagcggtggcttcgaaataagcaggaaaagctttctttttagggtgccgtttcatcatcaatacgtcaccatcctcatgaaaaaggataacatcaacaactaagtggaataagccttgtgggatattttgatccctattaagtgtaagacctgtaatgaacccatattggtcataagcatcccaaatttccattagacctccttgttatttttgactaaagaaatgttgccatagactttttttaggagactcctctttttttggtgaattgaataaatcagggaattgtgtctcaaaatcgttccattcaacgttttcagccttatcactatgtataataataccaaatggagaattggcatttgcttcattaacaatcgtagcagctagtgatagacggttagctaacttcatgtagaacatttgaacatcagtagggagatttggtgataattttaaactaagattaggatattcaagtatcagattattaagagcagatgttatagcaagttgaaacttttcttcttgtgcctcttttaaacttaagtggagcacaactctttctttataagtaccaaggtagtaacgttgttgatcaggatcaagacgattttcaccgcttgctttttgtaggattttattgtcaagttcagtcataatttctccttgaatttgctaattttattataacctaaatgggttgcattagcacaggtaaacttgaaaagaattagtgatttttttatcaaaaaccacgtaataaagcggtttcactgggtttttccttgttattaactaaagattatgatattatgaatatgtaaaatattaaaactcataaggagagtattgtaatgtcaattattactgatgtttacgcacgcgaagtccttgactcacgcggtaacccaacacttgaagtagaagtttatacagaatcaggtgctttcggacgtggtatggttccttcaggagcttctactggtgaacacgaagcagttgaacttcgcgacggcgacaagtctcgttacggtggtcttggaacacaaaaagctgttgacaatgtaaataacgttattgcagaagcaatcattggttatgatgtacgcgaccaacaagctatcgaccgtgctatgatcgctcttgacggaactcctaataaaggtaaattaggtgcaaatgctattcttggtgtttctattgccgtagcacgtgctgcagctgattaccttgaagtaccactttacagctaccttggtggattcaacactaaagttcttccaactccaatgatgaacatcatcaacggtggttctcactcagacgctccaatcgcattccaagaattcatgattatgccagttggtgcaccaactttcaaagaagcacttcgttggggtgctgaagtattccatgctcttaagaaaatccttaaagaacgtggtcttgaaacagctgttggtgatgaaggtggatttgcacctaaatttgaaggtactgaagatggcgtagaaactattcttaaagctattgaagcagctggttacgaagctggcgaaaacggaatcatgattggttttgactgtgcttcatcagagttctacgatgcagaacgtaaagtatacgactacagtaaattcgaaggtgaaggtggagcagttcgtactgctgcagaacaaatcgattaccttgaagagttggttaacaaatacccaatcatcactattgaagatggtatggatgaaaacgactgggatggttggaaagctcttacagaacgccttggtggacgtgtacaattagttggtgacgatttcttcgttacaaatactgattacttagcacgtggtatcaaagaagaagctgctaactcaatccttatcaaagttaaccaaatcggtactttgacagaaactttcgaagctattgaaatggctaaagaagctggttacactgcagttgtatcacaccgttcaggtgaaactgaagattcaacaatcgctgatatcgcagttgcaactaacgctggtcaaattaaaacaggttcattatcacgtactgaccgtattgctaaatacaaccaattacttcgtatcgaagaccaacttggtgaagttgctcaatacaaaggtatcaaatcattctacaacttaaaaaaatagtctcagattattaaacagttgaaaatataataaaaaccatcttgcatatgcaagatggtttttatgtacacattataataatagaattgatttgataataaacagttctaccattgcaatccagcagcagcgatttctgcttttgaagcgtattgtccatttggacgatgccaccttcctctatagtcacgtttgtagccttgactagtttgttcttgtactagagtttcttgttttttctgagtttcagctgcgagccttgcttgctcctctttttgcttcctttgagcttcagcagcaagccttgcttgttcttcttccagttttttctgagtttcagcagcagctttttcctcttcaactttcttttctgcaagtcgtttttcttcttcgtgcttagcgataagttttctttgttctttagctgataagacagtattttgagcctttccgctgaggtagtcaatggtagcatttggtgaggtattctctaaggtaacagtgctgatgccgaattgatcttgagtggatttgtttccgataaaaataggtaataatttcccagtcttatcaataccaacatattttaattcaatttttcttggaattagttcattattttgataaattggtgttactttataatctaagtagtagtttttatgagtcgaaagccaagtctttagttgtttttcatagaatagcatgctctcagggttagatgaattcgtgctattgtagtttccagtatttagccaattcgtcattggaactaaattctttctttcattgtttagtccactaaattggtggcaaataagacggcctcggctcattagccaagctttttgagtaccatcattataatagaatttaaaattgtgccatccaacaggggttgtttttaaacgttttactctctttttcttgggttcatctttaacttttagctgaatatgtgcgaatgtggcacgacctttgtcatccaactctcctaaaaccaattgtcgtttgtgtttaaaaggtaaagtaccattctcttttgttttatactcttgagcagtaacaatattttctgtggtatgatttgtagctaggtttattggtgtgtaaagcgaaataaccgttagtaaggttgcaattcctaattttataaactgttttcttttcatctgttaacctctaaaataacataaaatagtagctgtttatttttaaatgcattctgaaaattaaaatgtgatttttgtaacaatattataacataatgatgtatgacatgtgaagttaatttataaaagatgttacagctatatagaggagctatagtataaataaaaaattcaaaatatagcatatattatgatacaataatagcaaaatagattttgggagttatcatgaaattactgactaatgcaaatactctcaagggaaccatccgtgttcctggcgataaatcaataagtcacagggctattatttttgggagtatatctcagggagttacccgaattgttgatgtcttaagaggcgaggatgttttatcaactatagaggcttttaaacaaatgggggttctaattgaagacgatggcgagataatcactatctatggcaaaggatttgcaggtttaacacaaccgaataatctcttagacatgggaaactctggtacttcaatgcgtctgatagcaggtgtgttagctggtcaagagtttgaagtgacgatggttggagacaatagtttgtcaaagagacctatggatcgtatagcattgcctttaagcaaaatgggagctagaatttcgggagtaactaaccgtgatttaccaccattaaaacttcaaggtacaaaaaaattaaaacctattttttaccatttacccgtagcttctgcacaagtaaaatcagctttaatttttgcggctttacaaactaagggagaatctctcattgtagaaaaagagcaaacaaggaatcatactgaggacatgattcggcaatttggtggacatttggatattaaagataaagaaattcgactcaatggcggtcagagcttagtaggacaagatataagagttcctggtgatatttcgagtgctgccttttggatagtagcgggtcttattattcctaacagtcatattattttagaaaacgtaggtataaacgagacacgaactggaatccttgatgtcgtcagtaaaatgggtggaaaaattaagttatcttcggttgataatcaagtaaaatcagcaacccttacagttgattactctcatctacaagctactcatatttctggggctatgattccacgtctgattgatgaattacctattattgctcttttagcaacacaagctcaaggcaccacagtcatagcagatgctcaggaattaaaggtgaaagagacagatcggattcaggtcgttgtcgaatcgctaaaacagatgggtgctgatattactgctacagcagatggtatgattatacgtggtaatacccctcttcacgctgcttcacttgattgtcatggagatcatagaataggaatgatgatagctattgctgctctcttggtcaaagaaggcgaagtagatttatctggtgaagaagctattaatacaagctatcctaactttttagaacatttggagggattagttaatgcctaaggtattattgggattcatgggagttggcaagactagtgttgccaactgcttagaaaatgaagtaattgatatggatagtctgattgaaaaacatattggtatgtcaatttcccgattttttacagaagaaggagaagcctcctttcgtgctttagaatctcaatttttaaacgaacttttaaagaaaaaaaatgaaggacttgtgatagctagtggaggaggtattgtactccttgaagaaaatcgtcgtcttttaactttaaatcgtcataataatattcttttaacaggaagttttgaagtcttatatcatcgtataaaaaaagatgagaagaatagaagaccattatttttaaaccattcaaaagaagaattttatgatatttatcaaaaacgcatgttactctatagtggtttgtctgatatgattattgataccgattatcttacaccacaaaaaatagctactgtaattggagagtcactggttaatttatctaactaagttatcacagtttggtagtatgaactattattattgaaagtaaatcacctgaaaatatgtcaagaaataattacggtcagctaaatcatcatgaagagctacgatataactatcttttaaaaaacatccattatcttaatgaacgtgaaaagatggaatttcagtaccttcattataaaaaaacagcagtacgaccacagagaaggacagaaagtccaccaactaattcttattatgaggaaccttattctgattcttattatcaagatgacgatttttactcagagcctcagctaacctcacaaggtttaccaatttatcaagaagagagagctccgaagaagaaaaaacaaagggccagaaaagaaaaacagagggtgaaggttatggcgcctttccctccaaaggctataaccccccctagaaagaaaaaaaaatttaagggtttcctaaagttcataggtattatattactaattgttttatcaggtatggttttcatgtttgttaaaggaatgcgtgatgtgaataatgggaagtcacattatagccctgcaattattgaagattttaagggaaaagatgctgttgatgggactaatatcttaattttaggtagtgataaacgtgtcagcgagagatctactgatgcgagaacagataccataatggttgctaatgttggtaacaaggataataaggttaagatggtgagttttatgcgagatctcttagtcaatattcctaattatagtacggaaggttactatgatatgaaattaaatgcgtcttttaatttgggagaacaagataatcataaaggagcagagtatgttcgacaaacgttgaaaaatcattttgatattgatataaaatattatgttatggttgactttgagacatttgcagatgctattgatacactgtttcctaatggtgtcaagattaatgctaaatttggacttgtcggtggacaatctgctgattcagttaaagttcctgatgatttaaggatgaaaaatggcgttgtacctagccaaaaaattaaggttgggattcagtacatggatggaaggacccttctaaattatgctcgtttcagaaaagacgatgatggggactttggtcgaacacaacgtcaacaacaagttatgagagctattgtctctcaaataaaagacccacgtcgtctctttacaggttctgctgctatcggtaaagcctatgctttaacttcaagtaatttatcttatagctttgtcctaacagatggcattccaattttatcagatgctaaaaatggtattaagcaaatgacaattccaagagaaggagattgggtagatgattatgaccagtatggtggtcaagggttaacaattgattttgctaagtacaaaaagatcctaaagaaaatgggactgcgttaacatttttaattatgatataatagagtgatttattgtcactctatttttatctttagtgtataaactaaagacttcaaatgatagatataaaaggaaaattatgttacataaaaatgatattattgaaactgaaattagcgacattagccatgagggaatgggtattgccaaagtagatggctttgttttctttgttgaaaatgctcttccaggtgagattattaagatgcgcgtcttgaaattacgtaagcgtataggatatggaaaagttgaggaatatttaacgacttctcctcaccgaaatgaaggattagactatacctatttacgtacagggattgctgatttgggacatcttacttatgaacaacagctgttatttaaacaaaaacaagtagctgataacctttataaaattgctcatatatctgatgttttagtagaacctactcttggtatgacaatccctttggcatatcgaaataaagctcaggtaccagttcgtcgtgttgatggacagctagagacaggttttttcagaaaaaattcacatactctggtatccattgaagattatttaattcaggaaaaagagattgatgctctgattaattttacacgagatttattaagaaaatttgatgttaaaccatatgacgaagagcagcaatctggtttaattagaaatctcgttgttcgtcgaggacattatacagggcaattaatgttggttttggtgacaacacgtcctaaaatattccgcattgaccaaatgattgaaaagttggtgtctgcctttccttctgttgtttcaattatgcaaaatattaatgatcgtaatagcaacgttatttttgggaaagaatttcgtactctatatggttctgatactattgaggaccaaatgttaggaaatacttacgctatatcagcccaatctttttaccaagttaatactgaaatggctgaaaaactgtaccaaaaagcaatcgatttttcagatttaaactcagaggatatcgttattgatgcctattcaggtataggaacaattggcttatctgttgctaaacaagtaaaacatgtttatggtgttgaagttgttgaaaaagcagtaagtgatgccaaagaaaatgctactcgaaatgggataactaacagtacctatgttgctgattcggctgaaaatgcaatggcaaagtggcttaaagaaggtataaaaccaactgttataatggttgatccaccacgaaaaggattaacggagagttttgtatattctgctgcccaaacaaaagcagataaaatcacttatatttcttgtaattcagcgacaatggcgcgtgatatcaaactatttgaagaattagggtatcatttagtaaaaattcaaccagtagacttattcccaatgacacatcatgtggagtgtgtggctctgctcgtaaaagcctagaaactttttaacgaaaggaatattaaaaagccttagataatcgactgacctattaccaaaaaatcgaaggggctctacttgccattgcacaaacaccaggaaatagtttgccaactatgcagctgttagatgagttagttcttccaaaagacattaccatagcagatgtcagtcaaagtatccaagaatttgaaatagaaagagatgcccttcaagaattttttgacgatatgctgaagacttatacaacctaccaagaaatgaaagattatattaaatctcgtgaagcgaacactcctaagcaagagacagaagaaaaatcactttgaagactgtagacttaacataagtaaaaaataaccatatatgatatcgctttcattcttatgttttttgtgataaactaattaaagaaataatttttatactttattatggaggttcttatgaagaaagtgttagtgagtagtcttttggttttagggattacgataacgttacaaacagtagttgaggctaaggggccaaaagtagcttatacacaagagggaatgactgctctttcggacacaaataaagataaagtcactactatttctattgacgagattcaaaaaagcttagaaggtaagaagccgattactgttagttttgatattgatgatacactgcttttcagtagtcaatattttcaatatggtaaagaatatgtaactcctggatcgtttgattttcttcataaacaaaaattctgggatcttgttgcaaaacgaggagatcaagattccattcccaaagaatatgctaaaaaattaattgctatgcatcaaaaacgaggagataaaattgtttttataacaggtaggacaagagggtcaatgtataaggagggcgaggttgataaaacagctaaagccttagctaaagattttaaattagacaaaccaattgctgtaaattatacaggcgataaacctaaaaagccatacaaatatgataaatcatattatattaagaaatatggttcagacattcattatggagatagtgatgacgatattcatgcagctagggaggccggtgctagaccaattagaattttaagagcacctaattctacaaatctacctttaccagaagctggaggctacggtgaagaggttctcgaaaattcagcttactagtatctttattagttaacatagtattatctatcaatttttagatttgtaataagaagtgctaaaaaagtagcaaatcaatgatatgctaataagggaagttggagtagtttagattgattattaatgactgatcttctcccctctcggtaacaagaagtttttctaacaaatgcctgtctaaaaaaattgaatcataattttttaataactcttttggcgtgaacaaggaatttgtaatcagtcatctaattctataatacaatactttggggttgtttccgtatcattattaataatatgtatcagaaaggagatgttttttgagagtttatgaaaataaagaagagttgaaaaaagaaataagtaaaacatttgagaaatacattatggaatttaataatattccagagaatctaaaagataaaagaattgatgaagttgatagaactccagcagccaacctttcttatcaggttggctggaccaacttggttcttaaatgggaagaagatgaaagaaagggacttcaagtaaaaacaccatcggataaatttaaatggaatcaacttggtgaattatatcagtggttcacagatacctacgctcatttatctctgcaagagttgaaagcaaaattaaatgaaaatattaattctatctatgcaatgattgatttgttgagtgaggaagaattatttgaagcgcatatgagaaagtgggctgatgaagcgactaaaacagcgacttgggaagtgtataagtttattcatgtaaatacggttgcaccttttggaactttcagaactaaaatcagaaaatggaagaagatagtattataaattatatttttaactttaaaaaatttcataaaaatggttaccaaaggcgatagaagaaaaaactatcgtctttttctttataaagtattagatgaggaaaagaaatattattttttctaatacaaatattaaattctcacgacagatgtaatatatcttgctatttcttcaggctcttcagtaaagtcatgatctatccaatttaaaataatactttcaattgttgagatataaataccaagagcgaaagaatatggaacttgatatgctgtttccagttgtttttgtaagtctggtatatcggaatgtgtaatcatctctttgatatagtttttaattatgttgtcaatattcggaaaaaacaaaggatttaataatttctttatttatatacatatagctaagcatctcctttaagaccacttcttcatataataaatcattatttaaaatttttgtgatatcatcaaagattattaaaatagactccctaaggaagtcttcttttgaattgtaatgattatagaaagatcttctactaagtcgagctttttttgctaaatcgctaactttaatttgctcaaagctcctcatctttaacaattctgagaaagcttttaaaaattttaaattagtgttatctgaacttaccaatatactatcacctttatataaaatcttaaagttataaatcttatcgaatgtgattatacaatacaaattcaaataatagttcacatttatcgagataatgtaaaacagtaaaactttaaaaaaagtaaaaatagataactttattggttaatctatttttacttttgaaaaggagagaagttatgcttaggaagtataagcaaagaaattataatgtcgcacatacgaaacagcgtttttcgattaagaaattcaaatttggtgtagcatcggtattaattggattgacatttctaggaatgagtagtcattctgttttggcggatgagtcaagcattatgagtactgaggtaccacaaacagctggtgtaaaaccggaagttactgttacacagcctacttcagatgtaacaagtcttgcgacagatacgtcaacttcagcagtgttatcaacagatgcatctcattctaatcctacagaatcagcggagcatgctgtaggattagaatgagatgcagcggttccagtgacacacgaaaaagaagcaaataaaacattgcgagttacttcttcttccacatctgaattcacagagtggactaatgtcaaataagtagacagaaaaccgtgttattttattgcgttaaaataattttcttctttctgattaggggttagtcctagattagccgtatgtgggatgtaattgttataaaaattctcaatgtattcaaagcagtctaattgaacctgtttgatattttgataatgttttcggttgatttgtctatgctttaaatacttgaaaaatgcttcagttacggcattatcataaggatatccaggtttagaaaaagaatgcatgatattgttgtcatcaattatttttctaaattccctggccttaaattgtgacccttggtcggaatgaaagagaagtgttccttcaatctttcttttattaagagctaattctagagtgttacatgctaactttgcatccatacggtgactcaatttccaagcaatacattttctagaatagagatcaagtattgcgcagagatagacatatttcttatatccaatagaaatataggtgaagtcagtagaccatacttgattaggtttgtcaggataaaatttctggttgagtaagttttgaggatacgttttttgagtctttttaagagctgtttttgtcttaacggtagccattttagggagcgccatattcttcatcagatggtaaattcttccttcagagatttttgtgtcgtagtctctttgaagaatgactttgatagacttcacaccaagtcttttgtttgctttggtataaatctcaagtatttgttttttataaatttgattatccaattctctttttgagggcttatgttttagaaatttatagtaagtggagcgattgacacgtaaaacacgacacaaggttgttgtggcgtgttcaaagcgtaaccgatagacagcgaggagtcttactttaagttttgcatgaatatggcacttgctttttttaggataaggttctcctcttcaagctgcgcattacgtttttgtaactcttgtatttgcttggcagtaagtacagaattatcttcgagtttgaattgagagtactgtttgatccattttgcaagcgcagaagtggataccctatagtctttacagagttcagactgagtttttccagtttgataaaggttaacaagagattgtttgaattcttcatcatagcgtttaaatgttgacataggttgtcctttcgtttttgtgtcttttaaaacagattgtaacacacaaagttttgtctacttttatagtatacatccaccctttggcaataccaaaagtttgagcagattagttgagatgtgcaggaagttttgattatcgcaagagagaatcatcaagtgactcatgaacacgtgtcaatcttattgacctgcgttcaagaattgattgtggaagtcaatcaaacacagccactcagtcgtgagtttcgtgaaaagtatatgggttaggaggctgcaattgtttatcgttatcgtaccaatctcaaaaaagtctttctaacagattcagaattgaatcaattaaatgagcggattgctaagagcaattgtcaaaatttctcagtctatgctagaagagttcttcttaatcccaatatgtcatttgtcacgattaacacggattggaaataacatcaatcaaattgcgcgtgctatcaaccaaagccatctaatttctcaggctcagtatcactttcatcgagaagcacgttaagcccaacagcaggggggttgctctgattcggttaagtaataagcaaaatcctcaccaattttcccagtaataagaggcgttgttgaggtatagggattacctgtgccatagtcgatgatggtcacaaaatgaccattccccataaaagggccaaccaaaacttcacctgtgaccgttttttgatgtcaacaccagtattttggatgtaccccttaacatgccctttggtatctgcaacagagataatatgaccaaaggaagaatcaccgatgactttaaccgtaatcttgctatcgcctttttgattagccgctaatatttgattagcaatcagggtgcgaccaagagcaactgttgaagacgacaaggtatgatgtttttcctgagccaatttaacagtctcggtgctatcgaggacataagacctgaaggcaccagaggcagaaattgatttaataattttatccataacctatgttatagcacaaagagagagtttgtatggactggattagctgaaaattttagactaaaaagtagtgccagtggattttgaaaggtaacaaaagagtcttccgtttaaacgagaaggctctttttagtcgtttcagatgaaggcaaaaggacgatgaaataattccgtaccttcatggattgctatgttactggcatgaggtctcacgatatttagtaagatattcgtttgaagatattcccacgtattttttaaaggttttaagaaaatgtgtggtgtcgtaaaaatgtaataatttcgctacttccccaatcggtacccctctttgcagtagtaattgtccctccttaatttttgcctttagaatataactttgcaaggaaatgtcagagtattttttaaaaactgagcgtaagtgggaatctgagatatataggtagttggcaatatcagatactttgagtttggagtagaggtggttgtccacataatggagaatactattgtacatttgctgcttgtcagagatgctcttattggttaaggattctgaaaaatcaataagagctgcacagcgaattcttgaaacatcaataagatcaggagcctcttcgtttaaagccatatagtgctttaccagcgcataacttttagccacatcagtattttcctcgaaacttaattctagtaattttgttaagtaaacaacagttaagttcttttcagctcttagggcagggattgaagatgaggtaacactggatgatgggaggcgattaatttcttgctttaacagttgagtgttacccagcttaacgagatcaataatgtgattgagatggtttaaaacagtgggtaactgaaaagagtttttcttagtatgttttaggtgaagaacaatatcaggatccgcaacaatctgttctgactcttctaataaatgattgatgacttgttggcaactagcctcaaactgtgtttggaaaaaggcatcgatagacacaagaagactacgtatactggtagtaggaaaacaagggacaagctttatataggataagatttcttttttattacgatgagaaaattgttctagaaagcgactggataactgttcttgcctattgatatcagggctatagggataaaatggtccaatagcaataagatattgacagacaggaaaaattaagaatgattcttcaaaaagaccctcataaacagtgatatcttggttataagggatagctaaatgttttaaaaactgatagtaaggcaacagatagtcttcgttaccatataactgaacgagttccttgtctcgtgacatgactgaaataggtagttgagatatggtatgcaatgtttgaacatgtttaaaatcgaatgtaaccatttgatagaccgccttcattatcatttctagaatttttctttaggtttgtaaagactacaaaataaaatgatgaaaacaactatcttgtggatacactaaaaagacacgctaattagcaaactctctcttcatcatctctcaccattattatactactatttatatgacaaataaaggtgattttgttaaaatataactttgaaaatccacatatatttttaatcttccgtctgaaaaaataaataaaaatagtaaaaataaacacgaatttaaaataagcaaattttttaagaaaatctgtgctaaactttaatagttttgtgcttaataataatcagcacttacaaagaacaaagggaaaagcgaggagagaacttttaatgaaattatcgaagaagttattgttttcggctgctgttttaacaatggtggcggggtcaactgttgaaccagtagctcagtttgcgactggaatgagtattgtaagagctgcagaagtgtcacaagaacgcccagcgaaaacaacagtaaatatctataaattacaagctgatagttataaatcggaaattacttctaatggtggtatcgagaataaagacggcgaagtaatatctaactatgctaaacttggtgacaatgtaaaaggtttgcaaggtgtacagtttaaacgttataaagtcaagacggatatttctgttgatgaattgaaaaaattgacaacagttgaagcagcagatgcaaaagttggaacgattcttgaagaaggtgtcagtctacctcaaaaaactaatgctcaaggtttggtcgtcgatgctctggattcaaaaagtaatgtgagatacttgtatgtagaagatttaaagaattcaccttcaaacattaccaaagcttatgctgtaccgtttgtgttggaattaccagttgctaactctacaggtacaggtttcctttctgaaattaatatttaccctaaaaacgttgtaactgatgaaccaaaaacagataaagatgttaaaaaattaggtcaggacgatgcaggttatacgattggtgaagaattcaaatggttcttgaaatctacaatccctgccaatttaggtgactatgaaaaatttgaaattactgataaatttgcagatggcttgacttataaatctgttggaaaaatcaagattggttcgaaaacactgaatagagatgagcactacactattgatgaaccaacagttgataaccaaaatacattaaaaattacgtttaaaccagagaaatttaaagaaattgctgagctacttaaaggaatgacccttgttaaaaatcaagatgctcttgataaagctactgcaaatacagatgatgcggcatttttggaaattccagttgcatcaactattaatgaaaaagcagttttaggaaaagcaattgaaaatacttttgaacttcaatatgaccatactcctgataaagctgacaatccaaaaccatctaatcctccaagaaaaccagaagttcatactggtgggaaacgatttgtaaagaaagactcaacagaaacacaaacactaggtggtgctgagtttgatttgttggcttctgatgggacagcagtaaaatggacagatgctcttattaaagcgaatactaataaaaactatattgctggagaagctgttactgggcaaccaatcaaattgaaatcacatacagacggtacgtttgagattaaaggtttggcttatgcagttgatgcgaatgcagagggtacagcagtaacttacaaattaaaagaaacaaaagcaccagaaggttatgtaatccctgataaagaaatcgagtttacagtatcacaaacatcttataatacaaaaccaactgacatcacggttgatagtgctgatgcaacacctgatacaattaaaaacaacaaacgtccttcaatccctaatactggtggtattggtacggctatctttgtcgctatcggtgctgcggtgatggcttttgctgttaaggggatgaagcgtcgtacaaaagataactaaataaaaggctacttcttaagtaaccatgtttaagaaaagagaaatagccttatttctctttttgtcgtttttaaaataaaggaacatcatgaaacaaacattaaaacttatgttttcttttctgttgatgttagggactatgtttggaattagccaaactgttttagcgcaagaaactcatcagttgacgattgttcatcttgaagcaagggatattgatcgtccaaatccacagttggagattgcccctaaagaagggactccaattgaaggagtactctatcagttgtaccaattaaaatcaactgaagatggcgatttgttggcacattggaattccctaactatcacagaattgaaaaaacaggcgcagcaggtttttgaagccactactaatcaacaaggaaaggctacatttaaccaactaccagatggaatttattatggtctggcggttaaagccggtgaaaaaaatcgtaatgtctcagctttcttggttgacttgtctgaggataaagtgatttatcctaaaatcatctggtccacaggtgagttggacttgcttaaagttggtgtggatggtgataccaaaaaaccactagcaggcgttgtctttgaactttatgaaaagaatggtaggactcctattcgtgtgaaaaatggggtgcattctcaagatattgacgctgcaaaacatttagaaacagattcatcagggcatatcagaatttccgggctcatccatggggactatgtcttaaaagaaatcgagacacagtcaggatatcagatcggacaggcagagactgctgtgactattgaaaaatcaaaaacagtaacagtaacgattgaaaataaaaaagttccgacacctaaagtgccatctcgaggaggtcttattcccaaaacaggtgagcaacaggcaatggcacttgtaattattggtggtattttaattgctttagccttacgattactatcaaaacatcggaaacatcaaaataaggattagcatgggacaaaaatcaaaaatatctctagctacgaatattcgtatatggatttttcgtttaattttcttagcgggtttccttgttttggcatttcccatcgttagtcaggtcatgtactttcaagcctctcacgccaatattaatgcttttaaagaagctgttaccaagattgaccgggtggagattaatcggcgtttagaacttgcttatgcttataacgccagtatagcaggtgccaaaactaatggcgaatatccagcgcttaaagacccctactctgctgaacaaaagcaggcaggggtcgttgagtacgcccgcatgcttgaagtcaaagaacaaataggtcatgtgattattccaagaattaatcaggatatccctatttacgctggctctgctgaagaaaatcttcagaggggcgttggacatttagaggggaccagtcttccagtcggtggtgagtcaactcatgccgttctaactgcccatcgagggctaccaacggccaagctatttaccaatttagacaaggtaacagtaggtgaccgtttttacattgaacacatcggcggaaagattgcttatcaggtagaccaaatcaaagttatcgcccctgatcagttagaggatttgtacgtgattcaaggagaagatcacgtcaccctattaacttgcacaccttatatgataaatagtcatcgcctcctcgttcgaggcaagcgaattccttatgtggaaaaaacagtgcagaaagattcaaagaccttcaggcaacaacaatacctaacctatgctatgtgggtagtcgttggacttatcttgctgtcgcttctcatttggtttaaaaagacgaaacagaaaaagcggagaaagaatgaaaaagcggctagtcaaaatagtcacaataattcgaaataataaaatcagaaccctcatttttgtgatgggaagtctgattctcttatttccgattgtgagccaggtaagttactaccttgcttcgcatcaaaatattaatcaatttaagcgggaagtcgctaagattgatactaatacggttgaacgacgcatcgctttagctaatgcttacaatgagacgttatcaaggaatcccttgcttatagacccttttaccagtaagcaaaaagaaggtttgagagagtatgctcgtatgcttgaagttcatgagcaaataggtcatgtggcaatcccaagtattggggttgatattccaatttatgctggaacatccgaaactgtgcttcagaaaggtagtgggcatttggagggaaccagtcttccagtgggaggtttgtcaacccattcagtactaactgcccaccgtggcttgccaacagctaggctatttaccgacttaaataaagttaaaaaaggccagattttctatgtgacgaacatcaaggaaacacttgcctacaaagtcgtgtctatcaaagttgtggatccaacagctttaagtgaggttaagattgtcaatggtaaggattatataaccttgctgacttgcacaccttacatgatcaatagtcatcgtctcttggtaaaaggagagcgtattccttatgattctaccgaggcggaaaagcacaaagaacaaaccgtacaagattatcgtttgtcactagtgttgaagatactactagtattattaattggactcttcatcgtgataatgatgagaagatggatgcaacatcgtcaataacgatgttgtgaatggcttacttatcaaataggtgactaatgatgattgtgaataatggttatctagaagggagaaaaatgaaaaagagacaaaaaatatggagagggttatcagttactttactaatcctgtcccaaattccatttggtatattggtacaaggtgaaacccaagataccaatcaagcacttggaaaagtaattgttaaaaaaacgggagacaatgctacaccattaggcaaagcgacttttgtgttaaaaaatgacaatgataagtcagaaacaagtcacgaaacggtagagggttctggagaagcaacctttgaaaacataaaacctggagactacacattaagagaagaaacagcaccaattggttataaaaaaactgataaaacctggaaagttaaagttgcagataacggagcaacaataatcgagggtatggatgcagataaagcagagaaacgaaaagaagttttgaatgcccaatatccaaaatcagctatttatgaggatacaaaagaaaattacccattagttaatgtagagggttccaaagttggtgaacaatacaaagcattgaatccaataaatggaaaagatggtcgaagagagattgctgaaggttggttatcaaaaaaaattacaggggtcaatgatctcgataagaataaatataaaattgaattaactgttgagggtaaaaccactgttgaaacgaaagaacttaatcaaccactagatgtcgttgtgctattagataattcaaatagtatgaataatgaaagagccaataattctcaaagagcattaaaagctggggaagcagttgaaaagctgattgataaaattacatcaaataaagacaatagagtagctcttgtgacatatgcctcaaccatttttgatggtactgaagcgaccgtatcaaagggagttgccgatcaaaatggtaaagcgctgaatgatagtgtatcatgggattatcataaaactacttttacagcaactacacataattacagttatttaaatttaacaaatgatgctaacgaagttaatattctaaagtcaagaattccaaaggaagcggagcatataaatggggatcgcacgctctatcaatttggtgcgacatttactcaaaaagctctaatgaaagcaaatgaaattttagagacacaaagttctaatgctagaaaaaaacttatttttcacgtaactgatggtgtccctacgatgtcttatgccataaattttaatccttatatatcaacatcttaccaaaaccagtttaattcttttttaaataaaataccagatagaagtggtattctccaagaggattttataatcaatggtgatgattatcaaatagtaaaaggagatggagagagttttaaactgttttcggatagaaaagttcctgttactggaggaacgacacaagcagcttatcgagtaccgcaaaatcaactctctgtaatgagtaatgagggatatgcaattaatagtggatatatttatctctattggagagattacaactgggtctatccatttgatcctaagacaaagaaagtttctgcaacgaaacaaatcaaaactcatggtgagccaacaacattatactttaatggaaatataagacctaaaggttatgacatttttactgttgggattggtgtaaacggagatcctggtgcaactcctcttgaagctgagaaatttatgcaatcaatatcaagtaaaacagaaaattatactaatgttgatgatacaaataaaatttatgatgagctaaataaatactttaaaacaattgttgaggaaaaacattctattgttgatggaaatgtgactgatcctatgggagagatgattgaattccaattaaaaaatggtcaaagttttacacatgatgattacgttttggttggaaatgatggcagtcaattaaaaaatggtgtggctcttggtggaccaaacagtgatgggggaattttaaaagatgttacagtgacttatgataagacatctcaaaccatcaaaatcaatcatttgaacttaggaagtggacaaaaagtagttcttacctatgatgtacgtttaaaagataactatataagtaacaaattttacaatacaaataatcgtacaacgctaagtccgaagagtgaaaaagaaccaaatactattcgtgatttcccaattcccaaaattcgtgatgttcgtgagtttccggtactaaccatcagtaatcagaagaaaatgggtgaggttgaatttattaaagttaataaagacaaacattcagaatcgcttttgggagctaagtttcaacttcagatagaaaaagatttttctgggtataagcaatttgttccagagggaagtgatgttacaacaaagaatgatggtaaaatttattttaaagcacttcaagatggtaactataaattatatgaaatttcaagtccagatggctatatagaggttaaaacgaaacctgttgtgacatttacaattcaaaatggagaagttacgaacctgaaagcagatccaaatgctaataaaaatcaaatcgggtatcttgaaggaaatggtaaacatcttattaccaacactcccaaacgcccaccaggtgtttttcctaaaacagggggaattggtacaattgtctatatattagttggttctacttttatgatacttaccatttgttctttccgtcgtaaacaattgtaaggtgtcgttgaaattattaaataatagaaaatgactagttttggcctttccctattgtcagtcagattagttattatcaagcttctcatgccaatattaatgcctttaaaagaacagttacaaccattgaccgtacggagattcaacgacggttaggtctggctaaagcctacaatgctagtatttctggaacaagtagtcagtcgactcaatctgtgctgagagattcttattctgaggagcaaaaaaggcagggtggactgaatacgctaggatgttagaagtcagagagcaggttgaccatgtgatgattccaaaaatcaatcaggatttaccaatctacgctggttcagaagaggacaatctgcaacggggagttggtcatctagaagggataagtttgccgattggaggggcttctacacatgcggtcttgagcggtcaaagaggtatgccagctgctcggttgtttgcggatttggataagatgaaaaaaggtgattatttttatgttaccaatctgaaagaaaccttggcttatcaagtggatcgtatcatggtgattgaacctagccaattggatgccgtgagcattgaagaggataaagattatgttacccttctgacctgtacaccttatatgggctctttgtcaactgtaatgggtgacttatcattaacaacgagagagaatcagcttggttctctctctttttggatgttcaaagcgatgagaattttgcttttaaaatttttaaagttgcgaaagccaaaggcttgtcgcttgatgtctttgataagcttgttggtcgcttctaatttggcattggaaagggatagctgagggcgtttgtgatgtaagttttgtacttcatgaaggtcctaaagaccattttaaaagcagaattgccagttgttacgttatcatctatgaagctaaagaattcagttgttcgcttttcttagaaatgaaagagtatgagctgataaaggtcgttataatagcggagctcatctgagaaaacttttatacctcaaagtcagtctagctttgatatcatgaagccattaggagttattccttatcttttagtggcgcgcgatccatatagtgatagatcgagatatttagatccaaaagttctatcatcctcttttggcgccttttttccagcagataatattaaggtagcttggtctaacaactccagcactttatttacaccacctattaatgcaaactacaccactcagattcaagctattgggacaacgattaagtcacaaattccggaatcgattttgacggttacggataaaaagagcaggaagttcagcattaacaagattgacgaagctaaagaaggcttagtaggtgcgaccttcaccttgtctaaacgcacaacagtagcggcagatcatcaagtacaaggagatttcattcctgtcagcaaagagacgacagtcggtcggacaacccttacctttgacaaccttaaacctggattttatgaccttaaagaaacgaaagcgccgaatgcttacgtacttgatcctaagacttatgttgtggtcgttcaaaattcaggaaaaacgacaattgtggatgaagctaacttcaaagaggctgattacccaatggctgataataccagccatgtggagtgcgtagcgttgctacaacgaagcaaagggtaaaaatcctttattttaagcactttttcaagcattttgtctttattgaaaagagtgattttaacataaaaaaggtattaaaaaacatattgacgtgaccgtttgttttgaagtggcttgcgtagacaaaaaaatagatacgtcagataaatttctggcattacgagaacatttttagagtgttctctttttttagtttacggaggaaaaatatatatggaaaaacaggattcacgagttctcatccattgggaggggaattctggggacaagctcattgaacaccaaaccagcgcaacggggtggtactaccaagtcgatcgtagctttagtcaaccaaaaggggaaccgcccagaatgatccaaaggcactagaaagtgtccgtaatgattcgatttcgggcggtgatgatgtcatgggttatgcttatagcaaatgtacttggggagttgcggcacgaattaatcagtgggactgaaactcaaaggttgaaatggtgagaagattaccattaccagttcaatgggaaatggtcaggattgggttggaacagccgaaagactagatggtgaaactgatacagttccaaaagaaggtactattctctctttttaggaaagtagttatggttcgtatataggctacggaactatatctttcgtcacattacatctacagatagtaccatgaattttgcttatatgaccaagtaaagtgaggatatactaacaaatgaaatatttattatcgtatttgtccattttatcgaaaagtttgcatattatcattatgtttgataagatgcaaatataatgatagtaggagctaaatatggatatttaaaaaatcaagagtatcctaagtgctttccattttgaaattcaaatatagctaatagttctagaacttctaattgtttttcgtcgacgatatgaattttcaatcttaactgttaggattccacctccctttggttaaagaaaaaaggtcaggtcgtttagataactttgtcaaacaagctcaagctatctaaaaatagtttgaaatgggcattactctagtttttaataagctatctgatgagcagaaggagaagttaatgcatgttgggaagtcttattttgactatcaagaaaatgctcttatcccacaattaggttttctatattctaaattaactaaaaaaattgaacttgataatcggttgtctccgactgaaaaaaagttattgattaccttattattacatactaaaggtttaatcattgatatgtaagaagtaagtcagctaaccgatctttctattctaaaacttatattgttgctttagaaattttaaagagcgtggatggcttcataataaacagaaatcttaccaatttgcgaagccaaaaaatatgatatttgaagagtccaaagatctaatagatagtccagttagagaagcgttgattataagtgataaggattttcaaaaattaaaacaagagctattattttaaccgacttattttaaagacttatcatatctaggcttgcttgatgattcggaaaaatacggagactatactatttcaaggaaaagatacaaaagtttcgaatcaagtcttcaactatacatccttcaaagtcatcggctagagatttggaattatgaaccaatccctttgattactagaaaaataaatagcttggagaggctaacgtgacactggttgatccaatctcgctttatttaacactaagaatgatgaagaccctcgtattgaagaagaagttgagcagctagaagataagattttgagaatataatcgttttttcgtgctacactaacttgtcagggttgcaacagacaaaaaaataatttaggagggattcgttatgcgtacaaagtatataggatatgaaattgttttaaggggtggttattaatatggataagaaaaaggttgtttcaactatcgtatctacagggtttcttatagtttcaatatcaaatttttttagagagctatcacctatactttttctcttgaatattattggatttttctgcttcctattattattttctgccaacataaataaattgttcttaaaacgatagccgttatataggatatggtatgtatgcatttggtgaaattataggtaaaacgaatggaatagtacttactcctcaaagctatcgtgagaggtataaaaggatatcgaggagtcactagatagttggatctcattgaaaaaatttgtttaaagtatctcatataagcataaaacgaggaatcaatcaaaatttcttgattgattccttgttttttggctctttgtcaactgtagtgggttgatgaaaaattatattctggagaaaaccaaattggttttctcctttttgatattcaaagtgatatgaattctctttttaaaatattcaaagtttctaaagctaaatgtttgtgcttgatgattttgatgagattattggttgctcaagtttggtgtttgaataaggcgattcaaggacattgataaccttatctctgtctttaaaaaatgtcctaaaaacagtttaaaagattggagtgacactagagaaagtgttttaaacagggtaaagaaatggtgagcttgcttctcttgaaagtaaagcaggaggagttgatagagtttcataatgttttttatagagaagcgatatcttcttatcttgaaacagaaaattttgagaaggctaaagtgactgaagagaattaccaagtttttttaggaatccgtacttatcagaagagttataactatcaagatcatagtgagaatctaaaaggaaatattgaggtagcaatgataggagttgaaaataatattagcgacgaacatattttttgctagaatatataaaatgtctttgaaataatttagccctgtgttatgatattaaggaggttatttatggtacgtaaatttttaaaatcgctcctatctctctttcttatagcagtaatcgccaccggtatttcagtggcatgtttcttttttattccagaaaataaagggaatattacaccgattttattgcatcgctttatgcgaaaaaataatgttaatggaatgatgattgttagcgataatactggtaaaccgattaccatctcgcatgggattaaccgtggggaagttgaaacggatattgaaaataataaattatttccaatggcttctctccaaaaactcatgacaggaattattatccaaagattaattgatcaagatgtcttgagtgaagacgaccgattgtctcagttctttccccaagtaaaaggtagtaatagtattaccatccaccaattgttgacccatacgagtgggttaagagaaaaaggtgttaaggtgtctccttatctaaaaaatgagagagaacaattacaattttgcttaaaacactataactttgttaataagaaatcgtggtattattctaatatcaactttagtttcctaacaggtatagccactcaagttacgggaaggacctacgctgaacttgttgatgatgtgataaaaaatcctttgcgattagatgatacccaaagttaccaatcagttgttaatcatgacttagttagcccaatgcgaaagaacggcaagttaaataaaattaatatctttaatcaagtatccacagcatatggagctggagattttttcacaactccgctgaacttttgggtgttgatgcggtctttttctaaagggtactttttcccaacggatgaatataccaaacatcaaaatgatgcgatatcacattattatggtgggctttacatgcatggtcgtatagttaattctaatgggacctttttccagtattcaagttttggttatgcagatctaaagacgcatgatacaatggtgctttttatgaataacaaagtctatagtgatgctagtcacgtggcaccaaaagcatttgaatattatcaaaaatttatgttccttaataagattttccacttagtcttttactttgtattttctttctttttaatgcttttaatacgtcattcgtttaggaaaagaaggtataagaaacgtctctaaatcacatgaataaaaaagaaggctaagttggccttcttttttattcaatattaagcagtaacaccatctaagaaaacgtttgcattgaatttttaattgtgctataataaatagctgttaatcattattatagtttaataatctaactgtcgagctgatttaagctataaaaatactgttgagtaaaagaggtattaatatgtcaatgattgaagtttctcaccttcagaaaaattttataaaaaccgttaaagcaccagggttaaaaggagcatttcaatcatttcttcgtcctgaaaaacacacctttgaagctgttaaagatttaacatttgatgtgcctaaaggacaaattctgggatttattggagcgaacggtgcaggaaaatctacaacaattaaaatgttaactgggattttaaaaccaacttcgggcttttgccgtattgatggcaaattgccacaagaaaaccgacaaaattatgttaaggatattggagtcgtttttgggcaacgtacgcagttatggtgggatttagctctacaagaaacctatacagtgttaaaagaaatctatgacgttcctgataaagaatttcgcaaacgcatggcttttttaaatgaggttttggaactaaatgactttataaaggatcctgttagaactttgtctctcggacagcgtatgagagcggatatcgcagcttctttattacataacccaaaggttcttttcttagatgaacccaccattggcttggacgtttcagtgaaagataatatccgacgtgcaatcacacaaattaatcaagaagaagagacaacgattttactaacgacacatgacctcagtgatattgaacaactttgtcatcgtatttttatgattgatagaggacaagaaatatttgatggcacagtttctcagctaaaagagacatttggaaagatgaaaactctttcttttgatttgcgcccaggacaagagcatatcagctctagtttaattggaaagtcggagattaatattaaacgtaatgacttagttttagatattcagtatgatagttctcgctaccaaactgctgacataattcagcagacattagcagatttttctgtacgtgaccttaaaatgacagatgcggatattgaagatatcattcgtcgcttctatagaaatgagctataaggatgaacagaatttggagacgttataaaccttttattagtacaggaatccaaggattaatcacatatcgtgttgatttcatcctttataggataggtgatgtgataggagcatttgttgcattttatctatggaaagcagttttcgattcctcaagtcaatccttaatccaaggttttcagctgtcagatatgattctctatattattatgagttttgtgactaatttattaacaagaactgatagttcatttatgataggtgacgaagtaaaagacggttcaattattatgcgactcttacgtccagttcactttgctgcttcctaccttttcatggagattggttctagatggctcatctttttaagtataggggtaccgtttttgcttgttattacgggggtacgcctcttcttggggactgatttgattcaagctatagtgttagtggtattttatattattagcattattttagcttttttgattaacttcttttttaatatttgttttggcttctcggcatttgtttttaaaaatttatgggggtcaaacctgttaaaaaattcgttagtcgcatttatgtcggggagcttgattcctcttactttttttccgaaaatcgttgctgatattttaggatttttaccattttcatctttaatttacacaccagtaatgattattattggtaaatatgatggcagtcaaattgtgcaagccttacttttacaaatattttggctaatagtaatggtagctttatctcaattaatatggaaaaaagtacagttgcatatcactatccaaggaggttgagatgacaaaatatcagcgaatgcactttatttttattaaacaatacatgaagcaaatcatggagtataaaatagacttttttgtaggcgttttaggagtatttttaacacaagggttaaatcttttatttctgaatgttctttttcaacatatcccttctttagaaggatggacttttcagcaaatagcttttatttatggtttttctctcctcccaaaaggaattgatcaccttttctttgataacttgtgggctcttggtcaaaggcttattcgaaaaggagaatttgataagtatttaaccaggccgatcagtcctttatttcatgtcctagttgaaacctttcaagtagatgcattgggggagttattggttggttttattctgttatctaccacagtatctagtataagctggaccgtgccaaaagtattattatttatatttattatcccctttgcaactttgatttatacctccttgaagattgctacgtcaagtatcgctttttggaccaaacaatctggtgctgttatctatattttttatatgtttaatgactttgctaagtatcctgtcgcaatatataataatctattgcgttggatcattagttttgtcattccatttgcttttacagcttattatcccgctgcttacttcttacaagatagaaatgtctattttaatattggtggggttatcttgatttccttgatttcttttatggtatcactaatactttggcataaaggagtagaagtatatgagagtgcgggttcttgattagtaaggcaagccattaatttttttgagtgtttagaagttttaggcttactaacttagctttgttagtgatgatatactccccttatagtgtctagtgaatttttgtttttttactgtccactataaggggagtatatcaggtgaagagggactattagtgttgagaataatgtccctcatagaacaataattaccatatctttaccaaaataaagttaaaaacgctcttagatgtgctttctaagagcgttttttggtctataaaaggtaagcaaaaagcagatgtcatttatgaaagtgttgacaaagatgaaatactttgttactattttaacataataatgatattttaattagagtgtgaatttataattaatttttataatgtttattttaaatttaaactaatgtttatagcagtgttttactcatgattttgtgaattcaacacttaagtcatgacctcattttaaagagtttcagacgacacagaaaggaagaaaacataagaaaggcaatgcacggcttgtccatagtagtgtttgaagtagatgtttagaaatattttattttccaacagtactgatatcagagcgaagatgattagttgaaggtgataatatgggacgttctaatattttgagtaggtgtgaacaatgttctgataatcaatgtggcttgtataaaacgcggcttaaagacaagttactattagtagtccaactggttggaaatattaggtattctgagtttcttacggaaggtggtgtatatcataagggagaaaccttgttggaagttataaccttaggaatttcttatgaatataaaagttatggggatatcaaagtaatcaagaagtactgtgctgatggcagtgtcgttgattataacatgccaatactattaatggaaaggattgaataatgaaaacagtaataatatatggaggacagggtaatgttcagtcaaaacacctttgtcaactagttaaaactccaaaaggtgaaattcttttttcaaagttacaagcaactgatttagaatcatatcagttaatgatggatgtcattaaccacaaggtaagtttagacaatgttcatgcgtctatgttagcaaattttttatataatgattggctaacaaacgatgaaaaaatagtatctgggataggattttcagctcatagcgccggtattttcaatgtgttatatgctagtggtagtactagttttgaaaacattattcactttattaaacgtcgtgcccaacttatagaaaattgtcatgtgtctgaagagctttggcttttgatggttgaaaacattgatatgtttagtaaggatgttttaaaagaacagtctgagaaagtaaaattagctattattactgatgatagagctggtgtaattgctatggatcaagtcaaccgttctttctttgatgacgtgatgactaacaaaggttatttttataaattaaagcagttaggcgtaaaagcaccatatcatactgattttttaaatgaatctaaagagcagtataaacaattgattgaaagcctagatatttcgcaaaatgatgactatgactatatttttcattgtgatcaattggtagatgaaattttatatcagtggaccaatctctttaactggcgtgcgattaaggaaactatcatagaaaaggatgcggagattattgatatttctcctaataggtttatttctagtcagttgcaaaaaatgaaaaagagggggaggaaacagttatgaaagtagcaatagttactggtggtaccagaggaattggaagggctattacaaaagagttatacaaagaaggttacaaagtcattgctatttataatagcaatgatgctaaggcaagagctttacaagaggagttaccaaaattagacgtttataaatgcaatatttcagatgcaaaagcagtacaaaaattggtgactaaaatttttagagaatatggcggtattgattgtttagttaataatgctggtattgttagagatggctttttcttgatgatgtctaaggaaaaatggatggatgtcattaacataaatattatggggctagttaacatgagtaaagccgtgttaaaaatcatgaaggctaagcgtatacagggaaaggttatcaatatttcttcaactagtggtatagcagggcagatagggcaagcgaactattcagcaacgaaaggcgctatcatttccattactaaaactctagcgaaagaatttgcatcagatggtattacgattaattgtgtaagtccaggattcattgaaacagatatgacaaatgaattgcaaaataaagaagagctaaaagagcatcttattcctctaaaaaggtttggacaacctgaagaggtggcttggctcgtaagctttttagcaagtgagaaggcaaactatattacaggaaaaaatattgtgattgatggaggaatgattaatgattaactgggctgaagaacgtaaaataataaaaacacgtcaagaagtagttgatgaaattaaaggtattttgattgactctttaatgttggatattgataaagatctgattatgaatgatcaaccattatttggtcgtggattagagctagactctattgatgccctagaactgtcaatagggatttcaacaacgtttggtgttgaactaaatgatgatgatatttcaatattatcatcagtaaatagactagcagattttgtgattgaaaatagtgaggatatagatgaccaagctaagtagtgaagaaattataaaaatgttacctcatcgctatccgtttctaatggtggatagagtgcagagttataaaaaaggtatcattgaatgtcgtaagaatattactatcaacgaaccttactttcaaggacattttccacaacgtcctatagttccgggtgttttgatgattgagatggcagctcaatctgcagctttactttatattttagatgcacttgatggtagcctcccctctcttgatgaattaacagcagagaaaatagcagaaaaagtaggttatttagccagtgtgaagaatttcaaattcaagaaaattgttactccaggagaccagctaaacattacatgtaaatctcaatcaaaattggggcatcttttagaaattcaagtcgttattagagatgagaataaaaaagaggttgcctcaggaaggatgttggtatcagaaaatggaaattaaactcaaaaatattggaaaaaaatatggttcttttgaagcattgagagacattaatctcatctttgaagagggaaaattttatggccttcttggacctaatggagctggtaaaacaactttatttaaccttttaattcaaaattttaagcaaacgtcaggcgatattaagtgggaggtggatggaaaacctctatctattaaagatttttatcgtcacattggtattgtcttccaaagtaatcgcttagatgataatttaacggttgaggaaaatctaatttctagaggtgctttgtacggtttatctaaatcacaagtacgtaatcgccttaaagatcttcaaacgtatctagatatcacagcaataaaaaaacaaaaatatggcagtttatcaggaggtcaaaaacgaaaagttgatattgcacgcgccttgctgccacaaccttctctattattattagatgaaccaacgactggtttagaccctcaatctcgtcgcgatttatgggatgctatcgcacaactaaatcaacaatcgcagatgacagttgtactaattactcattatcttgaagaaatgtctgcttgtgatgttttaaatgttcttattgaaggaaacatttattattcgggagatattaaaagctttattgagcaacattccacaacaaacttgaatgtggtattgaaaccagaaaagtcattagaccaactttcgatagctgattttgttaataaatgtcaagtcctttcagaaagggagatagtatttaaggatatttctgttgaggaaatgatgcaggttatctcagacaatcaagataaatctattattgagacatttaatgttgaatattcgaacttagaggcggcgtatctcaacttgcttagagaaaaagaaaggaaaaacaatgtttgaactaatttctagaaatcgtaaagtttacacgcgagatcggttagcgtttttcatgtcttttttatcagttattatcttaattttggtctatcagattttcttgggaaaaattcaattagatgctataaaagcagcattgaggagtaatacagtatccagtgatactattcacatggttaattattggctcattgcaggtttgacgactattatttcaatgactagtacattaggtgcctttggagttatggtgtccgacaaagaaaaaaaattaaatgaagattttaaggtcagtcctatatcaaatatcaaaattgaattgtcctatgctatatttgccgttttatttggtattgtcatgacgatgttctcttgcatctttgctatcggtatttttaacggctttaattccttgctagagtattcagctatggattatttaactattttagggatcgtttccttagggactgttttatctgcggcgatgattttacctattttagcctttattcatactagttcagcttttacgactcttagcacaattgtagggacttttattggttttatttcaggagtatatctctcaattggctcggtaggaaaagcattacaacaggttatgacatggtttccattgactcaaatcaattctcttttgaaacaggtcttaatgaagggttctattgcgaaggtatttgacaaagccaacgaagccactgtctctaactataaagaatcatatggtgttgttttgcgtaatgctgatggagaaaggctgagtaatcactttatgttgatttatatcattgccctcattcttattttattggcaattcattttattattaaaaaggttaaaaaatgaaagatgataataaattaaagatttctgaagcttccttagaagattattctgaagtggttcatttatttaataggaatcatgtttatcaatttccagacggtaggcctttaactgttgatgaccttgatttaacgttaaaagttaaagaagtgacacatttatttttactgaaaaatcatggtgttttgattggaacatcagctttctttaaatttattacctatggttgtttagattggaatagtagctttagtggttttcttttaattgattcgaaaagtcgtagtggacaggcaatcacttatctatataaaactatcttaaagaagataacaaaactgaagttttctaatatctataccgaaatcagtaactacaataaaccctccttagctttatcaaaattgaatggcttcaaagagtatgataagacatatgaagacatactgcattgtcgatcattgcgtagtcacctccctaagatattgaatacgtttcgtatttcgaattattatggtaaaacatacgacatatcaacttttcaaattatggaggaaattgaaaatcccttggaagaggagacagaaattaggaccaaagtctctgatgaagaaatattatttaaagcagaagatagtgcttcacttccttattatttaaaaatgagcttgtttcaaatggaaattgctaagttagataaccgttatgttttacaagttgactttttatcggaacaagtaaagagggttcgggttaaaactggaaaatatcacttggcaaacttaacgagggctcaccctagcctaactttaagtcgttttgccaattattattacattcaagcaactgtggaaaccctttatggtaatatcgatgttcaactggaacgtcgaaaaaagcattatagagatgcaactatttgtcttaagagaacttttcaaggttatgatttacttatctctccaaatggcagccttatttttgaaaagcagaaaagaaagatacttgaagatagttttttgatttttagccaacctttggacaagaaattagttgtaaaagaagaagaaaatcacattacaatcaaatgtttctatcaaggtgctttaattgagaaaatcatgacatttacaagtgacgaagaaatcacttgtgtttataaatgtaatcaaaaggctaaagagatgttcccaaaattattgaaacagactttcaagttacactgccaagagcagttgattagagatagtgaaggttatcttgtgaatgttccaggaagttacccgattgagcatgatgattttcttcgagcagataagtttgaagatagacaattccattattacctcccgaatgaagataaaatgatttcctattctcctcctggcaaagccagcaatcaaatgcaatttagacccttatgtcttattgatacagatagcctttcttttccactgacttatcattttaggatttcacaagcatcatcggaggaggcgttaatcaatctaaaaaaacagccaatatgggacagcaactaccaagcgtcagcaactgaccttttaaaacatatctctaacctaacattagaagaagagaaggattatggcatcaagagaatgatagctaacagaaagcattatcctagtcacaaactggttttagcctataatcagattgttttgcctaagaatgaaattccaagagacagtgaattatattctatttcttttgattatcgaattagaggaaagtttgtccaaatccgccaaggggaacatgtcaaatatgataataaatcctatgttttggaaaatagtcaacaattagtattgtatgtagctagcgatgataaatatatactaatttctgctaaaaatggaatattttattcttacaaagagaacaatcatttaaaaataaggtgcatgtttaaaaggaactcaccttatgctacaaatgtgagcattacagaatatagaaagtgtgaagaaaaatgaatactatttataatacattgagaacagataaaggttataaagtttatgaggggtatttatatgaaattactggtgaagaatgtgaagaagccttagaccttgtgattcctaagaatattgtatttgcagatacagatacttgtggctacacttttttactcaatgaagatggaacagtttatgatgatgtgactttctacaaatttgatgataaatattggttggctagtcataaagctttggattcttatttagacaacatcaattttgactataccgtaacagatatttctgacgagtataaaatgctgcaaattgaaggaagatattcgggagaaattgctcagtcattttatgaatatgatatttcaacacttaattttcgtactttgatagagatgacttataaaggtgagaaaggttatcttgctagatttggtttttctggagaatttggctatcaatttttcctaccatcttctatttttgctacttttgtttcggatgtctgtgaaggtatagcagagtatggggatgaacttgatagatatttaaggtttgaagtgggacaacccattactgatatttatcaacaagaagaatattctttatatgaaataggttattcttggaatctagatttcacaaaggaagaatttagaggtcgcgatagcttgttagagcacatcagatcagcaacagttaaaagtgttggattctcaacgaaggaaaaactcgcttcaggaacaccagtgctatttgatgaccaaattgttggaaagattttttggatagcagacgagaaagactcttcggaaaattacctaggtttgatgattgttaaccaaacatatgctcattcaggagttacttttgtaacagaagatggccaaattttgaaaacacaatcaagcccttattgtatcccagaaagttggaacaaagaatgagcgtatatgttagtggaataggaattatttcttctttgggaaagaattatagcgagcataaacagcatctcttcgacttaaaagaaggaatttctaaacatttatataaaaatcacgactctattttagaatcttatacaggaagcataactagtgacccagaggttcctgagcaatacaaagatgagacacgtaattttaaatttgcttttaccgcttttgaagaggctcttgcttcttcaggtgttaatttaaaagcttatcataatattgctgtgtgtttagggacctcacttgggggaaagagtgctggtcaaaatgccttgtatcaatttgaagaaggagagcgtcaagtagatgctagtttattagaaaaagcatctgtttaccatattgctgatgaattgatggcttatcatgatattgtgggagcttcgtatgttatttcaaccgcctgttctgcaagtaataatgccgtaatattaggaacacaattacttcaagatggcgattgtgatttagctatttgtggtggctgtgatgagttaagtgatatttctttagcaggcttcacatcactaggagctattaatacagaaatggcatgtcagccctattcttctggaaaaggaatcaatttgggtgagggcgctggttttgttgttcttgtcaaagatcagtccttagctaaatatggaaaaattatcggtggtcttattacttcagatggttatcatataacagcacctaagccaacaggtgaaggggcggcacagattgcaaagcagctagtgactcaagcaggtattgactacagtgagattgactatattaacggtcacggtacaggtactcaagctaatgataaaatggaaaaaaatatgtatggtaagtttttcccgacaacgacattgatcagcagtaccaaggggcaaacgggtcatactctaggggctgcaggtattatcgaattgattaattgtttagcggcaatagaggaacagactgtaccagcaactaaaaatgagattgggatagaaggttttccagaaaattttgtctatcatcaaaagagagaatacccaataagaaatgctttaaatttttcgtttgcttttggtggaaataatagtggtgtcttattgtcatctttagattcacctctagaaacattacctgctagagaaaatcttaaaatggctatcttatcatctgttgcttccatttctaagaatgaatcactttctataacctatgaaaaagttgctagtaatttcaacgactttgaagcattacgctttaaaggggctagaccacccaaaactgtcaacccagcacaatttaggaaaatggatgatttttccaaaatggttgccgtaacaacagctcaagcactaatagaaagcaatattaatctaaaaaaacaagatacttcaaaagtaggaattgtatttacaacactttctggaccagttgaggttgttgaaggtattgaaaagcaaatcacaacagaaggatatgcacatgtttctgcttcacgattcccgtttacagtaatgaatgcagcagctggtatgctttctatcatttttaaaataacaggtcctttatctgtcatttcgacaaatagtggagcgcttgatggtatacaatatgccaaggaaatgatgcgtaacgataatctagactatgtgattcttgtttctgctaatcagtggacagacatgagttttatgtggtggcaacaattaaactatgatagtcaaatgtttgtcggttctgattattgttcagcacaagtcctctctcgtcaagcattggataattctcctataatattaggtagtaaacaattaaaatatagccataaaacattcacagatgtgatgactatttttgatgctgcgcttcaaaatttattatcagacttaggactaaccataaaagatatcaaaggtttcgtttggaatgagcggaagaaggcagttagttcagattatgatttcttagcgaacttgtctgagtattataatatgccaaaccttgcttctggtcagtttggattttcatctaatggtgctggtgaagaactggactatactgttaatgaaagtatagaaaagggctattatttagtcctatcttattcgatcttcggtggtatctcttttgctattattgaaaaaaggtgataaaatgagtaaatttttatttgctcctttcatgatgaatttaggagagagccaaagattatcaaaactggctaattgtttatatgaacaaggacatgatattcatatccttggagacaattattatccatttttatttaataatgatgcttatcgctatcaccactgtgtagaagataaatctgtttataatagtaagcgatatgatgctttcttttctctttcaacagactttaattttttatcagaagaagaaattgaacgcatctgttctattgaaagagacttgttacgccaagaaaaatttgatgctgtattgacaggttaccgtctatctattgttacaagttgtcgtttagaaagcataccattaatttggattatttcaggggcaacgcatatcagtgaaattgttgaaaactcagaaggaatattgcctaatgggaagataagtaaagctagtaagcctcaaacaaaggattttatcaaaagagtaatcactacttattcaacaaatgttaaaacgtggaataactatattaaaaaatatggtggcaaaacttttaataatgctttagaattatttactggtgatctaaacttggtaacagattactctttgttttatgaatttgataaagattcgtcctataaaacgataggacctattttgatagataatgtaggtttttcaaaatgcagccaaattaatcaagacaataagactgtactgctcagctttggtacttcatttaaacgagattgggtggaatcttttttaaagacattaccaaggcattatcattatttactgacaagctgtggtgaggctataaacattccaggaagttatattgagatagttgattttattgattttaaaaccatagataaagagatttatttcgctattatacacggtgggcaaggaacagtttatgcgatggctgcacaaggtattccctttataggtatccctttctttaacgaacaattttggaatattaagaagttcagtaaagaaaagtgcgcttatttggtaaagaaacctgatgtaagagagatacgtaaagcaattagctgtcttgaaagagactatgatatctataaaagttatatgataagactaagccaaggaattaaagaagaagcagaggcatctttacaaaaagcggaggcagaaattgaatcctttatcagaaaaagacaaagttaactatattatgatttataaaaataggcagtctacattggagaataatttatctggcgatcggttgatgagatatcaacaagcaaatagacaggtaagcaaagataaactgttaacagggagttattttgtgtaccaatgcttaaaaaagttaggttttaccaataagatttgtcaggaatctttttctagtgttagtagttatttaattggtttgccaaaggggaaaattagttactctaattctggtgactatcatattctaacctatgctcccagtggttcaactggggttgatattgagaaatacaaagatagatcagaacaaacctaccaaaactacctaggagaatcagttagtagtgatatggattctaaattattattttataaggcatggttacaaaaagaaatttcctataaatgtgggaaatctatagatattacctatcaaacaatgatagatggctatatttatggttatgcttttgataatacttttaaagtagaagcggtttacttaaaagaattattaccagataactaactcgcaacatgttgttcctacatatgcatctataaaaagcactttgaagtatttcaagggctttttataataccttgggtagtctttaacaattatggttagagttgatatgataaactgatcatttccacattttatgagaaaatcagaaaatagaggtgtttttttgtgataataattagaaataataaaaactgaaatattttctaatgtaaaaaaagataaaagaacttattgctgaaaacgattttaacttaacatttgccattgacaagtacttagaggagtgctaaaatttcgttagctggttaacaaaccggttaagtaatgtgaggttcttttatgagtgaattcctttcagccaaacctattggtcataatgattcatctaatactattttaagaattatagagaatacgaaatatattcatcactatgatggaaaagttgttgtcgaaattcctcctcaaaaagagcctatcaaagtcttttttatggattcacgtcttcattatttagaattttcagacatatgtcggtatgtaactgttgttttgaaaaatagtaccgttgataatataaccaatttagggccagataatcatattgtttatgacaatggtgatgatatggttgatccgttgccgagtattcagcatggattatttcttaatgatgattaaagatgtagacaaaaatttagaaacgaggaagccatgacattttataaaaagacggacaaatttggatttaggaaaagtaaagtgtgccgcagcctatgcggtgctttattgggtacagtagcagttgttagtctagctacagcaagtacagagattcacgctgatgaagcaacaacctcacctaccactgtaacgaaagtacctcagccagttcaagcagacacaacagctctaaatacctctaagactcacagtacacaagcaactacaactcctgttgaagctaaggagaataaggttgtcaaaagtgaaactgttcaatctgagagccgagtaatgcctagagataaggtagtagaaaggccagaaacagtaaaagctagtgttaactcagacgttagccaacctattacaaccacacccccaacaattaatgaaaaaacagttgagattcctaacttagctcaagatactaagaaggtagctccaaaagtaactgttacaccagaagttgttaatcagccaaagcagttgcctaaatacgagtaagaaaactcagagaaaggcaataagagtacagaagcaactaaggcagttactgtgactaaaccacagggggcggttgctgagaaagctactccggctgtgccaaagcctcaaaaagtaagagtaattgttgaatttaataaggaatctatcttagattatgcgacagaacagaaaaaaacagttgcacagttaaatcaagctgatgttgagaaaaaattacaaagcatcaagcaagagcaagataaagttcttaagaatattgaaaaaagtgttcactttgattcaagcaaagtgaagcgttacgatgctattattaatggtgtcgcacttgatattcaagctcaagaaattgaaaaattaaaaacgattgctgatgttagaagggtctatgtctcacaagaatatgttcagacaaaacctttactatcttcctcagggcaacttattggtttgccagaagtttggaacaactcccagtataaaggtgagggaactgttgttgcagttattgattcaggggttgatttcaaacaccaagcactaaaaatcaaagaaccaaatcgtgctaagtataataaaactagtattgaaaaactgattcatgaaaagaatctcaaaggaaaattctattccgaaaaagtaccttatggttataactattatgactataatgataacctcaaggatagctacggtgtaatgcatggtatgcatgtaacaggtatcgtaggagctaatgatgataatcaaaaattgtatggtgttgcaccaaatgctcaaattttagcgatgaaggtattttcagatgaccaacaaaatcccacaaccttcacagatgtgtggctaaaagctctagacgatgctattttactaaaagctgatgttgttaatatgagtcttggaacacctgctggatttgtacatgaggggaaagactatcctgaacttgaagttattgcaagagcgtgtaaggcaggaatcgtcattgcagtagcagcaggtaatgaaggaaatatcactgacggtaatacttatggtgttaagccgctagcagaaaattatgatacagccttgattgccaacccagccctcgatgataataccttggctgttgcctctatggagaaccttaaaaagcatgctcatgttttgaaatttaaagataaaaaatctggaacagaagttacagaagtcattaatcttcatgttgccccaaacgcttcaaaaactattattggattggctgtagatttgggagcaggagctccttcggaattgtcaaaacattttgatttaagtggtaaaatcgccatgcttgaaattccagaagataataaatctaatggatttttagaaaaagtacaggcgattactaagttaaatccagctgctatcttgctttacaataatgcgaaggttaaagatgatttaggcagtcaattattagttgaatcagaagcagctaaatttaatattgctcgcattaccagaagcacgtataacaatatcaaaaataatagcaataaaattattactattttaacagagcgtcaagctattgataatagtttagcaggacaattatcttcttattcttcttggggacctacaccagacttacgtctaaaacctgagattacagctccaggtggtcatattttctcaactgtggaggataatcaatatgctgataaatcaggaacatcaatggctgcacctcaggtagctggggcagctgcagttttaaaacaatacattacagataaaaaaattcctgttgataatgctgctgattttattaaattactcttgatgaacactgcacagccaattatcaataaacaatcaaaagatggcaaaacaccttactttgtgcgccaacaaggtagcggagcaatgaatcttgccaaagctcttgttacgacagtcgttgcaactgtaacagggactaacgataataatgcagatggtaagttggagttacgtgaattaaaagagaaaaaatttaaagcacgcattctacttcgtaactttggaaaaactaataaaacgtatatcatctcatcagaagcgattgcggacccagttgatgaaaaaggatttcgtacgcaaaattcagaacacctagtatcaaaaaaagctgatgcagttacaaggaaagttactgtagaagcaggtaagacattagctgttgaccttgatgtggattattctgatgcagaggctttaactcgcaataatttcttggaaggttatcttaacttaaaagatactgaaggtgtagccgatttacacttaccatttttaggtttttacggttcatggacagagcaaaaagctattgatgcttttgaaggcatttctgaaattggtaacggtgacaaaaaacgtcgcgttcaattctatgttaataaagaaaccaacaagacctcatcaacctttacaactaacggcatgttgagtcttccaatctataacaatacagtatttttctctcctaatagtcctttctatgacaaagcaggagttcgtattgcagctttgcgtaatatggagtatgttcaatattctattatagatccagataccaataaagaagttcgtgtacttggtagatcacacgacgttagaaaactttatcgcctagattatcgtaatagttttgccatgatgccagattctatttgggatggtaagattaaagattaaattgcaaaaggggataaacaatacatttatcaaattaaagtacagttgaataataaaggtgtcggtggcgatggtgtccaaatttatcaatactatatcaaaatggacaacaataaaccttacttaagtcccaaagataagactactgtagagaagttagaagatcgctggaaaaaaattactttcaaagttcaggatactggcattggtttgaaagacgtttatcttcaatctgttaagtatgttggtggtggcaataataatttagaccttatcacacctccaggatttaaaaaagaagataaaaaagttgaaaaaccaaaattagaccgtccaccaggaattgatttaccagcaccaacttcaatgagaagttttgattattcaaccccaccgggaactaagccaagcaaacccaaagatagtttatcaactcctccaggtttcccagatttaaacacgccgccggatgaagcaccaaaggatagtaaaaaagacgctattgaagataaatcaggagcaattaaatatgctaagtctcttcaacttagctttgttgatggccctattttagctagcaaagtaaatggcaaaatattacaagtcgaatctgatggcaaattagtcattcctagaaatgctttgtcagctaatcaatttgatgacactagtcttaaaatttatcgtaataataatcgcaataaagaaattactatcacaacagattattttgcagatacaaaatatgtcaatatcacagcggttgactatttgagcaatactacttttgagcaattagctactggtgaaacagtagattaccatgccattgtattttcaagctttgctgctattaaagacaagggtggtaagatttatgttaacgataaattgcaagaaacttctcgtatagcgcttaaagataaatctgttaagattggtattgaattaccaaatgatgtcagacatattgatagtttatctgttcgtcgtttgaatgaggttaaaactgttgataatatcttgaaaaatgatgaacaagacattaatctcagcaaaacttaccaattaaaatacaacccgacaaatcgtcgtctagagtttactattaataacattaactcaagttcagaaatcatgaccactttcaaagatggaaagatgccagaattggttgaacaaaaagatgtttctttggatataaacgatatggacatgagtaagtttaaaactattcgacttggacgaaaggattctgaatttaagggacaacttattgcaaaaactggaacagttgaattagatatgtttttcaaacaatctcaagacccagcttcaattattaaaaaaatataccttatccaaaatggtgttccaaatgaattgaaaaaatttgactctagttttggtttaactgaaagtcagatagatggatactatatttataaagatgcaattaaccttaaatttaaattaaccagtggtgcaagtcttaaagttgtttataaagggcaagaagatccatatagtcatcagaaagaagatatgactaaaaaaggtgaacagctcagtcattcaactcaagccaatgaaaatacagcaaaagtaacctttgctaatattgactggtcacattatagtaaggttactgtgaatggaaaagaagttgttaaaggtagtgagttacctttaactaaaggatggacaacatttgtattacataaaacagaaaattcattaaatgttaaaagtttgattatggagacgggtagtgtaagtaagaaagttcaacaacttcctttaagtcctagattatctaaaaataagcatatgagggatatgctacttactatgcaaaaagattcagcgtattacgaaacaagtgacagtctagtccttcgaattaatctcactgcagatactaaacttaattttaatgctgttaaaggagcgagtgctcttactgaaaatatgatgatgagacagtttgcagttgctggaccacaagatgatcctgttagtgaacataaatacccatcagtatttctcttaactcctgccttattggaaactgctagtgaggcaactctaaatggtaaggaaatcacagcatctggtattatcggtcacatcaaggatggtgataaaagcaagcatgttgaagtcaaaatggtgaatgaaaatggagacatgctaggaacccctgttattattcaaggtaaagacttgactaatcgaacaaaaccattaatgagtggacgtagagtactttatgccggtaaacaatatgagttccgggctaaattaccacttagtcgttttaacacttggattagggttgaagtggtaacagaagcaggagagaaagcaagtattgttcgtcgcatgttctttgaccaatcagttccagagcttaacacagcagttgctaaacgtgatttgacttctgatactgctcttatccacatcgttgccaaagatgactctctaaaactaaaattatatcaagatgattcattacttgaatctgttgataaaaccggtctttatagttttagaaatggtgtagaaatcactaaagatatgacagtaccactagaatttggagataatattattaagttatctgctgttgacttatcaaattatcgtcgtaatgagacccttcatatctatagaaaccgttttgatgttaaagcaagccaaatgacagctgacaaaggagctaaagtaactgtggatatgttgatgaagcacttagttgttccagaaatggcaggagcttatacattaacaatcgacgaagctccaaacacaaatgaatcaggaatgttaacaaacgctaaagtatcgattcattatgtaaatggtggtgttgataaagttgatgttccgattaaagtagttgacttagaagctattcgtaaagctgaagaagcacgtaaagctgaagaagcacgtaaagctgaagaagcacgtaaagctgaagagggacataaaacccaagaagcacctatagttgaagaaggctacaaggttaataacgttcatcaaactgatactacagttaaagcgtctgatttaccaaagactaagacagtttccgcagttcatatggctagaacagacaataaacagataacttcacatcagacacatgttgaaaaacaaattaaaaatacattgccatccactggtgacagcaaacgtggttattatatcactggaatggctatcgttatgctgagtgtattatttagtttagctaaaaagtttaaaagcaaatattaatgataaaataaaatctatttagcaacattaattgtgatggataaaaggttttatctcttaaatcaaaagtagtagctcattagctactacttttttgtataagtgtaaaaaagtgaattcttaacaagaatttaacaccctacttgctatactaaaagtgaataagaaagagaggtgtcatttatgcaaagaaaatcctatttaaaatccatgagtgttcttactttaacagcttgtcttatatcaggatatgtggttaaagatattgctatgttacatgcagtatctgccagtgagaagaaagcaaataatgtcagtccgagagaaaatctctacagggctgtcaatgataattggctagccaatacaaaactcaaacaagggcagactagtgttaatagtttttcagaaattgaggataaattaaagcaactgttagtgtctgatatggctaaaatggcctcaggaaagattgaaacaaccaatgatgaacagaaaaaaatggttgcatactataaacaaggtatggactttaaaacaagagataaaaatggtctcaaacctctaaaaccagttttacaaaaacttgaagcagtctcttcaatgaaagactttcaaagtttggcccatgattttgtgatgagtggttttgttttaccatttggtttgactgtggaaaccaatgctcgagataatagccaaaagcaattggtgcttcgtcaagcacccgcattacttgaatcacctgaccaatataagaagggcaataaagaaggtgaggctaaattatcagcttaccgtacttcagcaatggctttgcttaaacaagctggaaaaagtaacattgaagatagaaaactagttaaacaagctatagcatttgatagactcttatcagaaaaaacgcaagttgatcaaagtaaaatcacagctgaaagtgagacagctgcggggcgatataaccctgaaagtatggaaacggttcacaattacgccaaggaatttgactttaaagaattgattgaaaaactagttgggccaacgaataaggcagtcaatgtagaagataaaacttattttaaacaggttaatgatgttataaatagtaaacaattagccaatatgaaagcatggatgatgatttctatgctagttgatcaatcagattttctaggagaacaaaatcgtcaagcagcgagtgcttttaagaatgttgcgtctggtttgactcagattgaatcgaaagaaaaaatgcttacacccaattagaatatacttttggccatattttgggtgattattatggtaagaaatattttggtgaggcagctaaaaaagacgtcgaacatatggctaagaaaatcattaatgtctataaaacacggttaaaaaacaacacttggttatcagaaaatacaaaagcaatggccattaagaaacttgataacatgagattaatgattggctatccagaagattatcctgatctttatcgtcagtaccaatttgatagtaaagcaagcttctttgaaaacaatgataactacagaaaattatcgaacaagaaaacatttgaagaatttaaccagtctaatcaacgtgaacattggcaaatgagtgccaatgctgtaaatgcttataatgatcctaataccaattccatagtctttccagcagcgatttttcaatcaccactctacgataaaactaaaacagttagtcaaaattatggagctatcggagcaattattggtcatgaaatttcacactcatttgatattaatggtatgaaatatgacgagaaagggaatcttcacgattggtggactaaagaagatttaaaacattataagaaaaaaacacaagctatgattgaccaatgggatggccttaaagcagatggcggtaaagttgatggtaaattaactttagcagaaaatattgcagataatggtggtgttatggcatctctagaagctcttaagactgaaaaaatccaaactataaagaattttttgaatcatgggcaagtatttggcgtcaaaaagcaaccaaagaacaaagtaagtcctcaattcagtcagatgttcatgcaccatatgaattgagagctaacatcccagtacgtaatttccaagaattttatgatgcctttggtgttaaaaaaggcgattcaatgtatctaaaaccagaaaaacgtttgacactttggtaaagctatgttttccagacaataaggagaatgcatgaagaatataacaaagctatcaactgttgctttaagcctactactttgtacggcgtgtgctgcatcaaacacgtctacatctaaaacacagtctcatcatcctaaacaaactaaactcacagataagcaaaaagaagaacccaaaaacaaagaagctgctgatcaagagatgcatccccaaggcgctgttgatttgacaaaatataaggcaaaaccggtcaaagattatggtaaaaaaatcgatgttggtgatggcaagaaaatgaacatttatgaaactggtcagggaaaaattccaattgtttttattcctggtcaagctgagatttcgccacgctatgcttataagaatttaattgagcggttaagtaaaaaatataaaatttatacagtagaaccattaggctatggtctcagtgatattcctactaaaccacgtacgctagaaaacattacaaaagaaattcacacaggcctaaataaaattggagttaaaaatttctaccttgcagctcactcacttggcggtatgtattctttaaattatgctaaaaattatccagaagaagtcagaggatttattggtatggataccagtacaccttggatggaaggggaacaaaaaacaaagtatgaccctgaaagtgctaaatgggcaatgaaattaccagatgttgatgataagactaacgaacagtatctgtcaattgcgaaaaaaattaacggcaataagtctcaacgagatgaagatgagcgcttaggtgataatcttggtaaattgaagaatgtaaaattccctaaagggatgccaactaagtattttcttgctgatcaatctgtggagggaatcaagctacgtcaagcagattttaaaggtttgaaaaattgggatcagcagcatattgatttatctgaagatccaaaagatgcttccgttgaaatttttaaaggtagtcacaatattttccaaacacaatatgaacatatggctaaagctattgatggatttatccaatcccatcaaaagtaatcgttgaatgaaatacctaagtcaaggagaaaaaatgaataaaataacgaaattatcaaccgttgccctcgctttgatgctttgcgttggatgttctgccaataaagataatcaaaaaactaaaactgagcagcctaagcaagaaaagtcaatcgctaagcaaaaacaagagagagaagcagaaaaagctatgattgctaaaggtgctattgacctaactaaatataaagcgaaaccaattgaagattacggacaaaaaattgatgtcggtgacggtaaaaaaatgaacatatatacaatgggtcaagggaaaattccgctagtagtcttccctggtcaagctgaaatttcaccacgttatgcttacaaaaacttgcttgatagattagggaaaaaatataaaatttatacggttgaaccgctcggttatgggcttagtgatatgacagataagccacgtacgattgaaaatattaccaaagagattcatacagctcttgaaaaagtcggtgtcaaaaatttctatcttatggctcactcgttaggtggcatatacggtctaaattatgctaagacatattctaacgatgtcaaaggtttcattggcatggatacaagcacaccaaatatggaaggtgatggcacaactggagaatcttcagcttcaaccttaaaatgggcagaatccattccagaagttgataagaaaaccaatgaacaatacttatcaatcggtgctaaaaaatcaggtaataaaacagagcgcgataaagataggcgtgttagtgacaatcttcataaaatggaaaaagttaagttccctaaaggtatgccagctaagtatttcttagctaatgagtcagcagaagatataaaaatgcgtaaaaaaatattccctaagcttaaaagctgggaacaacaacatattgacttatctgaagatccaaaagacgtttctgttgagacactagatgctagccacttgatttatcatacgcaatataaacatatggcgaaggctattgacgagtggattcaatcgcatgaaaaataattattccccccaattattttactaaggagaaaagatgaataaaataacgacattatcaaccatcgccctgactttaatgctttgcgttggatgttctgccaataaagataatcaaaaaactaaaactgaggatcctaagcaagaaaacgtaactgcaaatccgaaggaagacaaggcaacagcagccaagcgaatgaagttaacgaaagaacttgaaaaatataataaaggcacagagagctttattagtaacaaacaatatcaaaaatatatcaaaacacctatcaaagaatatggtcaaaaggttgaagtcaaaggcaagaagatgaatgtctatactgttggagaaggtaaagtaccaattgtctttattcctggtcaagggacggtgactgccaaacatcagtaccataatttgattagtaatttaagtaaaactcataaggttgtggtagttgagccatttggttcaggtttaagtgatgtcattgaccaaccacgaaatctagctaatattacctcagatatccacgaagctttacaaaaagttggtattaccggaaaatatgtaattgcctctcattcaattggtggtgtttatgcccttaaatacatcagtacttatccaaaggaagtgctaggattaataggtttagatacatcaacgccgggtatggaaggtggtaagcaagttgatttcgctgctccagtgttaaaagaattacctaaaattcctaaagtatccgacgatattaatgcacaattttttgctattggacataagatacttaataattctaatatgaaagaagaagcgaagaattcttctaatatgattaacgaaagtgccaactataagattccaaagggaattcctgctatgtatttattagcacgtgaaagtgacttagggcttcaattacgtagtttagatataccaattaaaggcagttggcaagagcaacataaggagttatcagaagatccaaaagaagtctctattcatacactagacggaactcaccaaatttatgatactaaccttaaagaagtaattgattatactaaccaatttatgaaaacatttgagaaataattgtttttagaaacagtgctataaaatcactaattgatagataacgtagaagtcgatagagaatatctaacgacttctatcgttattctagagattattaagatagaaaaaggagggaaaatagtgaacctatggacattaagtttagcttatttgaaacgtcaaaaaatgaaaacagtaaccttgttcttagtttttctaactataggcacatgtttaatcagtctgatgagtattcagcattctttggaaaaaaatatcctaacaaaacaagggaaaagcatttatttaacctccaaagaaaaggcttattggcctgaacaagcatacgaagctttgaaaaaagcaaaaatggttgagtcagtagaggcaagtttaagcattgatgttggtagccgtttaaaatctgtatcaccatataactcttctaaagaagagaatcaagttacattagcaggttatcaaagtacagaagatttacgagcttttcagacaaaagcattggtcttaaagaaaggaagccatttagcggccgataatacaaaacaagtactagttccattgaagttagcacaaaagaatcatttaagtgtgggtaacaaattgagattaggcaaagaaaatgttactattgcaggaatttatgatgcgaatagtgctaagtctaaaaatacttttaatcccaatattgataatacattgattgctcaggcaacattggttaggaagattagtaaacaaaaaggttatcagacggttgcagtgcgcttaagtgataaacgtttagtggatacagttatccaaaacatcaaacaatggccgcttgatttcgggaaattagatgttcaaacagctaaagagttttatggagattcttatcgtaatatcgagacattgcatcgtctagtgggacgaatcattcttattgttagtctcgtggcgatggcaatattagttgtcatgctaacattttggattaataaccgcattaaagagacgggaattttactcgctatcggaaaaactaagtttgaaatcataggtcattatctgatagaagtactgttagtagcaggtgctgccttcacactatctattattggtggtgtctttcttggaaaaacatttgcagctggccttttatcacaagttaatggtggtgtgagttcacaaattgtacaaaatagtagtctaattattgatagaattgataacctcgctgtttctgttggagtaatggatgtctttagactctatgctcagggtgctttaatttgcttatttgcagttgtattatctagttattctattcttaaactacaaccaaagcaaatattgtcacgaatgtcataggaggttaatatgaatttatttaaacgttcctttttatatgttagccgtaaaaagcgtaagagtatcactttattcgtatgtttatggctagttgcttctacattaattagcggtattgcggtaaaaaatgctggtcttactgctaagaagacattttcaaggcaaactggatcaattttgcatatttcatcggatagtactgaccttgttggtgatggttacggatctggagaaatccctgaaaaagcaatagttaacatagcaagtaatccaaatgttaagcgcgttaataataatttgatggcttatgctggactaacctcggaaaaaatggttacacgaccaaatgataaagaacaatataaagaacaagttttacaagttcatggtaatagttactccgatacagatcctaaatacacagcggggatgatttctcttaagggagggtgacatatcacgccgaaagatcagcgagttataattgttcatcaggcttttgcgaagacaaatcatcttaaagttggcgataagttaatgttttcaaaagaccccgttagaaacagtaaggataaaacattagttgaagcaactattgttggcatatataaaggtaaaacggtacaaaaatcaaattacccttatgagatgctagaaaatacagccttttcagatacgcaattgattaaggatttatacggctattctaaaggtaaggccttttatcgccaaacaactgtatatcctaaaaagaatgctgatatagaaactcttaaaagttttatcaaaaaacaatcctattgattggaataaataccaactgacaattacagcaaccttgctaacaagttatgcaaaaagtatagatgtcttgaatcaattaattacttctctacaaggcggcatgttagtagtatctattatcctagtgatgatggctctgctattctggattggtggtagaacccatgagacaggtattttattagctattggtaagtctaaagcaattatcattgtcagtacgcagtagaagtactaatgattgctattccagcctttgctttatcagtacttatcagtcaatttattggtcaaaaattagcagactccttagtgtatcaggcctctagaactgtcagagcagactttatgaaagggtttgggaatatgcagcttggggctgatagtgatacagatatgtttatgcaaacgattaagacgttaaatgtacaagtgaagcctgaggaagtctggttagtaattctagttggtttagcaatcgtcttatttgctattattactactagtttaattattgctcgctacaaaccaaggggaatcttatcaaaactgtcctaaagtgccataagtataccgaccaatagtgacatctatattaacggttaaaatgaatatgctctgctattgaatacatagctcaagaaagagaaatctatgctcgaattaaaaaatattgcttatcgttataaggggaacgacaataaaacattagaaaatatcaattatagttttcagtcaggggtattttatactatattagggaattctggttcagggaaaacaacccttctatccttgatggcaggtcttgattcgcctactgagggacaagtattatttaacaaaaaagatattaaagaagcaggttatgctcagcatcgcaaaaagaatatagctttggtctttcaaaattataaccttttagactatctaaccccattggaaaatgttcagttggtaaaacctactgcagataaacaattattgttggatttaggtttaaaagaagatatgttaacgcgaaatatcttgagattatcaggagggcaacaacaacgtgtagctattgcgagagctttggttgtaggaacaccagctattttacttgatgaacctacggggaatttagattttgacatttcgcgtgatattacgatgcgtcttaaagattttgcgcataaggaaaaacgatgtgttattatggtgacacatagtagagagatcgctcatatggctgatactgctttacaattgataggagataacttaaaagaattatcaaaagaaagtatagcacagtctatattacaacaaaggaatttataataaaaaaatacctccctttcttaaataataaaagaggaggtattttttagaaatggttatttattatcagaaaaggctcgctctgccatttgttgaattttaattgtagagttattctgataaacgacaccattaaccagtgcaccatgcgcatataaacctggcattggaccatattttggagacaaaacttgtgcattttcagttaaaatagtaatccctccttgatcgtcaatttgacaaaattcttgattgatgagcgattttagaagtggattggcttttgtccagtttttagtgtttaactggtaaccagtagcgttaatgacgcgatcgacagatatatgattttgtttttctttttctattgaaaatccttcgtcattttttgtaattgtcttgacgttattgatcagagaaaaagtccctttttgtgcagctttcaaaattactttagcagattcatcaggcataggatttcgcaagttaataatcgcttttccatagagtgctttatactctttcttatctgataatgacatgagtggccaaaggtcagttaaccagacagtgattcgtgaagctaattgttgtaatagatagagttgcttagggtatttaaaggctaacttgagaccatcaattcctggggataaaaaagtttctgttgtatttttccagtttttaaagccaagatgctccaattcgccagacatcaaatcattaaaatcggcaatagtgaaggtttttgaaggatgtgatagaaatgctttaaggttatcattggtaaaaaagtgccaagtaagtggtaaatcattaacaatacggacgctagggaagtagttggttcttgaaaatgctttaacagaagattgtgtattgagtagcaaccattttataacatcaattgcagctagaccagtcccgatgatagcaactgtttttcccttccaattttcctgagccaagtatttgataggataagggtctttgatataatcggtcttcccttccaaatgataaggttctataacaggcagagcaccacaagctaagtgtaattcatcaaatgtgacaggaaaaagcttatcttgaatatagacttgccattgttgctcatctgataaatagtttagtttatccactcttgttttaataaccgtgacagggagtttatctaaaagtaacttagttctttctgaaaggtattgtccgtaaagtgtccttgatacataggttagatttgtgtcatagtaattttcttctaaccaatccatgaagtcagacatatggcgataatcaaatgaaatatcgttgattggggaattgattaaagctgagtcaacgtcttcttgaaaaggaattcctcgtccaaagtggacagtatcatcaaaacaaaaaatagctaactgttttaactctttctcttttttacgagaaagtgctagtagaacagctaaaccactaactcccatacctataataccaattgtttttttcacagaacaagcctccttaccactatcatagcataaattttgatttaagttaggggatgaacaaagctattatttgcagattttctaatttaatgagtaaattaaatttaaagtaatattaaattaatataagattaaataaatgattgacatgcttaaataataggcatatgatatggttgtgacaaaaggagagcaattagctaaaacggatatcaatatggtagacgcttgtttaatgtaattagaaagaggtaaagcttatgaaaagattacataaactgtttataaccgtaattgctacattaggtatgttgggggtaatgacctttggtcttccaacgcagccgcaaaacgtaacgccgatagtacatgctgatgtcaattcatctgttgatacgagccaggaatttcaaaataatttaaaaaatgctattggtaacctaccatttcaatatgttaatggtatttatgaattaaataataatcagacaaatttaaatgctgatgtcaatgttaaagcgtatgttcaaaatacaattgacaatcaacaaagactatcaactgctaatgcaatgcttgatagaaccattcgtcaatatcaaaatcgcagagataccactcttcccgatgcaaattggaaaccattaggttggcatcaagtagctactaatgaccattatggacatgcagtcgacaaggggcatttaattgcctatgctttagctggaaatttcaaaggttgggatgcttccgtgtcaaatcctcaaaatgttgtcacacaaacagctcattccaaccaatcaaatcaaaaaatcaatcgtggacaaaattattatgaaagcttagttcgtaaggcggttgaccaaaacaaacgtgttcgttaccgtgtaactccattgtaccgtaatgatactgatttagttccatttgcaatgcacctagaagctaaatcacaagatggcacattagaatttaatgttgctattccaaacacacaagcatcatacactatggattatgcaacaggagaaataacactaaattaataaaagagcaactaattgctctttttttgttgtcattcttagtgattaatagtgttaaatagaaatttttggatacattacttagtgttccgatatgatttgacaccagaaataaggacaggaattaaggtaacaaatacaattcccaagataataagcgagaagtgctgcttcacaaaaggaatattaccaaagagaaaaccagaacctgttgcaataactgaccaagataatgctgcaatgaaggcgcgtttgataaatacttttggagggagctgactaatacctgctacaaaaggaacaaaggttctgataatagggatatagcgccctaaaatgatggcagcagtaccttttttctcaaaataaagctcagcatctcggatatttttttctttaatgaaacgacgaaagaaaggatgtttgataaaacggtaaccaaatgtacgaccaatcaagaagttgcaactatcaccaataaatgctgcaataaagaaaataataagaaaagttacaatattgaaggacatttttggatttgcagcaagggctccagcagcaaataataaactatcacctggtaaaaatggaaagatgacagccccagtttcaacgaaaataacgaggaagagcaatagataggtccaattaccaacagtgttagccatagcatagatatgagtatcaatatgtaaaataaaatcgattaaaaacataggagtctcctttattgatcaactaaagtgcagagacttggatgataactatcttgtttataaggcctcttacaaagcctattttatcagaaaatttttaataagaggtaaaataagtttacttattaatttagaattattctaaagagcttttttttgatttttatgttagacttaattataatgattataaataagaaataaaggagcttaacaatgtcctatttaacctttaaacacgttgattttaaaacggatgataagttggttttaaatgatatcaactttgcaattgatgaaggtgattttgtttctattgtagggccatctggaagtggtaagagtactgtattaaaattagccagtggtttaatgagtcctactgcaggtcatattttctttgatggaaaagatttgaaccaattagaaccgattgaaagtcgaaaaatgatttcttactgttttcaaacgccacatttatttggtaatacagtggaagacaatattagttttccttaccacattcgacacgaaaaagtagattatagacgcgttgatgatttatttcaacgttttgaaatggaccagtcttacctgaaacaggatgtcaaaaaactatcaggaggagaaaagcaacgtattgctctgattaggcaattattgtttgaacctaaagttttactcttagatgaagttacttcggctttagacaatcataataaagctattgttgaaaaggttattaaatcattacatgacaaaggaataacgattttgtggattacgcatgatgaggaacagagtcgtcgatttgccaataaagtcttaaaagttgtcaatggtagtattgaagcaatggaggttataaaatgagcggtgaaaattctatttctttaatgtcattactaatggcatcgtcattagttttgattactttatttttttcttactggcaaaagttaaacctagaaaaagaagtgattattagcgctatccgagcagtgattcaattattagcagtgggttttttgctagactatatatttggttatcaaaatcctattttcacagctcttttaatgctattcatgattattaatgcttcttataacgcagctaagcgtggtaaagggattaataaagggtttgttatttcatttatagctattgggtcagggactataatcactttatctgtcttgattttttcaggaattttaaaatttgttccgaatcaaatgattcctgtaggtggtatgattattagtaattctatggtagcaatcggtttgtgctataaacaattattgtccgaatttagaagtaaacaagaggaagtggagacaaaattagctttaggagcagatattttgccagcttcgattgatattattcgtgatgttatcaaaactggtatggtacctacaattgattcagctaaaacacttgggattgtatctttgccagggatgatgacagggttaattcttgctggaacttcacctatccaagcggttaaataccaaatgatggtgacgtttatgctattagcaacgacttcgatagcttcttttgtagctacttatttggcttataaaattttctttaataatcgtaagcaattagtagtaacaaaagattgattcattttaataaacagtatgttagtctggtaagtatagtccaggcttttttggtatcttaatcttatttttgatcgaaaattgaccaagttattgagtcgattacgtttaaatgctactatttaatagaaattgttgtagggattatcaaaaggaggaagaaatgattttaaaaatttgtcgtgcagcatatagtttacaatggggaggtgtttaccaattagctttgctggattatcctcgaattaaggcgtttgaattggaaaggataggagctttcatagcttacgagaaacaatataaaagaaaaactgagatacaatgtgacgataaacatctcctcgcaaaaattgttcattttttaaaatacaatagttttacttttccctatattcccaaatatagagaagcggcagctacttttaatgaggatggtattagtttaacttctgattttttaagccatacatgtacgattgaaactgcaaaactaatttttaaagaaggtaaaatcttatcagcagttaaagcctttaataagcctgctgaagtactggtaaaagataagaggaatgctgctggagaccctaaagattactttgactatgtgatgttgaactggtcaaataccaattctggttatcgtttagtaatggaaagattgttaggcaaagcaccatctgaacaggagttaacagtaggttttaagccaggggtcagttttcattttacttatcaagatatcatcaatcatcctgattctatttttgatggttatcatcctgctaaaattaaaaatcagctttctttagcagaacatttagttgcatgtgttatcccaaaacattatcaagaagattatcaaagccttgtgcccaatgacttgaaacacagggtttattatttagattactgtaacgaaacactttatgagtggaatcaaaaagtttatgattttctttgtcatttggaaaataaataaaaccaaaaagtttaaaactttttggtttaactgctattaattggtctttaaaagacttaaaaattcttcaatcataggactaaaagaagtatcatttcggtaagcaataccaatcggataaaaattatttttatccttaagtgggacccagcataaatcttgaacttggctaatgctttcaaattcacttggtaaaatagtgactgcattgaggtcttgtaaactatgaataagaacttcccagtcattgtgtttaaagacgatatgggggtcaaatcctaaagcacgacatttacgaggcaacatctctcctagcatataatgttcgttgagtgaggcaactttataatctcttaaatcattaagttcaatttcaggaagtgttgcaagaggatgcgattttggcatgacaatgcttactttatatcctttagttgaggtttgcagtggttcgatagtgatatcattgcgggtacttggaaaggacaataagccaatatcgatctttccttttgctaacaattcttgtaatttacgggaaccatcttgaatcaaagatacttcaacatttgaatgtgtagccataaaagttgaaatctgtttcataaattgaatagcaaaaagagaagtaagccctacacggataccttcctttttttcttgatttaattgctggatctccgtaaccatttgattaacattagtcatcaacaattgtcctttctcatagagaatttctcctgcttcagttaaagcgagttgacgaccattttgtaagaataaaatagtatttaattctgcttctaattttttaatggattgtgaaagtgtaggttgggtcacaaaaagactttttgcagcgcgtgaataattttttgcttctgcaacagcaataaagtaagtaagttgtctaatatccataatatctgtccttttttcttagtaatagtatagcacaagtctatcaatctgacctttatgattatttccacaataatattagtaaaagctatacttatataattttttccaattttccttttgcaaatagctatgatatagttaatatagttagtgaaatcacaaacaatcattattagtaggaggcatcttatgtcggatgttgtcgaaaaacaaacaactaaatcgtttataatgaacgtattaaatggtttagctttagggactgttattgtcttgataccaggagcaatccttggagaattaatgaaagctttactgccaatgtggagcggctttgcaactttaatcgctgcaacagcagttgcaacaagtatgatggggcttgttattggtattatggttggtctcaattttaaatttaatcccattcaatcagcatcactaggattagcggttatgtttgcaggtggagctgcaaccttccttaaaggcgctattatgctaaaaggaacaggcgatatcattaacatgggaattactgctgccttaggtgtccttttgatccaatttttatctgacaagacgaaatcattcactttgattgtcattccaacagtaacactcttactagttggaggagtaggtcatgtgttattaccttatgtcaaaatgattaccaccatgattggacaagggacacgccgtacgcatgaaaactttctcttcatccttttgtgcccggacatcaattttgaaaagattcctttttaaatcaatgatctgcttagcctctttctccaaataattggactaaataatcttccaaatggacagaaatataccgttgtttgcgacgataactgaggtcttttttaggaaataccatcactttgagaaaatataagcacatttttcggataagatttaggttaaatgcggctcttttatccaatgtctgatgatgatcttcatgataaacaacgtccaataaccagtgcatactctctatctgccaatgacctcgtacacaattggcaaatgtgaggacatccggcttaaagctaaagataaaataacgattctcttgactcagctgaccatccttatcaatcgtgttacgagtcatcccaataccacgtaacttatgccatttgggatggttttgacacaaccatttgatatcggaagacacccagtattctctaacttcaatctgtcccctagatttttcaacagtctgataatactgcgcattttcttggagttcttccaataagttgacatcactaaaataaagagcaatatcatcataaagtgtttcttgatttcctttgacggctaagcaatagtctgctttaccttttataatcgtatcaacgatagccgtctgcgtgcccattgcgtctatcgttacaatgcttttacggatatcaattgtccgcaataactgaggaatggcaacaatttcattacttttctcctcaaccgctacctgtcccaaactaagatgatgacccccatcataagccgttacaatatgaacaggcttctgatttttacctcgattgcctcgaatcgttttaccgtccactgaaatcagttgatgaacggcatctaagcttgtcaatgattgctcaaattgaactttaagctcttttaaacggtctgaattaacaagactaatcacacgctctaaggtatcatgagacggacaaccttcactcaaatcaacgtaggtcgcaaacaatggttcattcatttcaataaaatcttccatctccttccaggtttcaatgccagctaactgacaaacaaagacaagaaatagaatggttgataaggggtagcgaattttccaagattgacgactatccaattcaactgcgcaatcatcaatagaaataataaaatcaatcatcgtagtcacctcatctatagtgtactactttgattgattttgtcattatgaatctagttttctgaaaacaaaagtttcttcatgcgtttggcgtggacaagggattgcttcattacttggtttacaacctgttttgatgtcaattttaattgcgatgattttctgtttcttgatcgtatctccaatcacaacagttgggattgctttggcaattagtttgtccggaattggttctggtgctgctaatttaggtatctgtgctgctagttttgggctttgtatggctgggtggtcagtcaattctaaggggacagccttagcgcatgttttagggtctcctaagatttcgatggctaatgtattagcaaaaccgaagattatgctacctatgatatcttcagcagcaatactaggaattctcggagctctctttaatattcaaggaacaccagctagtgcaggttttggtatcagtggtttgattggaccgattaatgctcttaatttagcaaaaggtggatggtcagttatgaatatgttattgataattataatatttgttgctgcaccaattatattgaattttatttttaattacctctttataaaagtacttaaaattattgatccaatggactataaattagatatttaaggagatattagtgatgaaactcaaagtatttaatgttagagaagaagaagcaacattagcacaagattgggcaaaccgaaatcatgtggaactttctatgagtgaaggacctttgacattggaaactgttaatgaggtagaaggttttgatgggattgctaatgcacagattgagcctttagatgatgctatttatcctcttctcaaagaaatgggaattaagcaaatcgctcagcgcagtgctggtgttgatatgtataatcttgagttagctaagcaacatggtattatcattagcaatgtgccaagttactcaccggagtctattgcagaatttacagtgacaatcgctcttaaccttattcgaaaagttgagcttattagagctaatgttcgtgaacagaatttttcatggaccttgccaattcgaggacgagtcctaggtaacatgactgtggctataataggaactggtcgcattggtctagcgactgctaaaatttttaaagggttcggatgtcgtgttattggttatgatatttaccataatccaatggcagatggtatccttgagtatgtcaattcggtagaagaagctgttgaagaagctgatcttgtgtccttacatatgccaccaactgctgaaaatacgcatctatttaatttagatatgtttaaacagtttaaaaaaggtgctattttaatgaatatggcacgtggagcattggtggaaaccaaagatcttcttgaggctttagatcaagggcttttggagggagctggtattgatacttatgaatttgaggggccatatatacctaaaaattgtcaaggtcaagacatttcagacaaggatttcctaagactgattaaccatccgaaagtaatatacactcctcatgcggcttattatacagatgaagcggtcaaaaatctagtagagggtgccttaaatgcttgtgtagaagtgattgaaacgggaacaactactacgaaagtcaactaaaagatgcttaggcatctttttttgtggggtaacaaaacatatgatgatcatgacctttaaagcaaaaaaacatcttatgtatttatagctggaaagtcttttttataataaaaaaagatattttttataaaaatattgaaaaaacatcagatgaatagtattatttaatcataaaagcgtttacaaaatacaaggagggttctctcatggagaaaacaatggatatggaacaacgtgaagaagttgtatcttataaccgagcgaaagtatggcagttagttatgtttgccatgaacaatgcttctacaaatatatacttatttacgtttatgtttgttacctatttctcaactggcgttcttggctcggcagccatttttgtcagtcaaattatgggttatatccgtatttttgatggttttattgatccagctattggtattatgattgataaaactgatacaaaatttggtaagtatcgtcctattttgattattgggaacgttattacggctttgtcattgatttttcttcttgcattgagaggtgtcgatgaaaatattcgtttcccattatttatccttgttctaattatccataaaattggatactcaatgcaacagacaataactaaagcagggcaaacagcactgacaaatgaccctaagcaacgtcctatttttaatatcgttgatgcagttatgacaacatcattaatgacaggcggtcagtttgtcgtttcagttttcttagtaccaaaatttggtaattttacacctcaattcttcaatgtccttatttttggaacaattcttatttcagctattttagcaatcgttgcaattattgggatttgggcaaaagacagaaaagaattctttggtttaggagagaatacccaaaagactgctctaaaagattactggaaggtgttgaaaggaaataaaccgcttcagatattatccattgctgcagctttggtaaaatttgccatccaattctttggcgattccgttgttatggtgctattgtttggtattttatttggtaattatgctttatcaggacaattctcacttcttttcattgttcctggtgttattattaatattttgttctcaacaattgctcgtaaaaaaggtcttcgtttttcatatgtcagagcaattcagatcggtatgattggtttacttgcttttggtgcagttctttacgttggtaagcctggtgaccttagtttaacaagcctaaatctttatactattttatttatcgttactaatattattgcgagatacgcttcacaagcacctgctagtttagtattgactatgggagcagatatttctgactatgaaacttctgaatccggtcgttatgtatcaggaatgattggaactatcttctccttaacagattcgattgcttcttcatttgctcctatggtagtaggttttgtgttagcaggaattggattttcaaaatcatttccaactatcgaaacaccactgccccctgatttaaaaatggcagctattagtatccttgtggccattccatttatagctttgtctatagctcttcttttaatgaaattttacaaactagataaagaagaaatggttcgtattcaagagaagattcaagttatgaaagcagcaactactaaggaacgtgctaaagatattgctcgtaatgttcctttgacagatatggattatgttgatgtaacaaaatatcctattgataaagattaaaaagtttagctgctcttcaatagagcagctattttgttaaataagagctaccattggaggattcttatggcaaaaattatttcattaggtgaggttcttttgcgattatctccacctcaatatcacacactgatgcaggctaatcacctaaaatgccaattcggtggttcagaacttaatgtcttagcaagccttgctcaactaggttaccatgtaggattggtctcagctttgcctgataatgatttgggcaagatggcaagtcaatttatattgtcacagcaaattagtccagctgctataattaaaaaagaaggacgactaggaatttattactatgaacaaggattttcggtaagaacaaataaggttatctacgatcgtaactattcatctttttgggaaagtaccttgagtgattatgattttacttctatttttaagggagtggattggtttcatgtttctggaattactccagcactaaccaaggacttatatgaggtgactcggttccttatgacaaaagctaaagaaggaggtgtaaaagtatcgattgatctcaattttcgtgagagtttatggtcatcttttcaagaggcacgtgagcaattatcgccactattaggattattagatgtttgctttggcttagagccgatttatttagctggcgaaagtgaagatttaaaagatgagttgggcttatccagaccttaccttgatattgaattacttgaaaagataacccaaaagattgtccaagaatatgggttagactatattgcctttactcaaagggaaatggaatatactaatcagtatatgttaaaatcatatttgtatcataataatatgttatatcaaactgataaaactggcgttgaagtattagatcgtgtggggacaggagatgcctttgctgcaggtttaattcatgcgcttctggaaaaagaaactcctcaaagggccttagaaatagctatggctacatttaaatacaaacataccattcaaggagatatcaatatcatgacacgagatgatattgcttacctcattgaaaaagaaacaaatgatattaaacgatagtgtaaaaggagagtgtatgttatatccattattgacaaaaacaagaaatacttatgatttaggcggtatttggaactttaaattaggagaacataatccaaatgaattactaccttcagatgaagtcatggttatcccgacttcatttaatgatttgatggtaagtaaagaaaaacgtgattatataggtgatttttggtatgaaaaagtcattgaagtacctaaagtatcagaggatgaagagatggtgctgcgttttggctcagtgacacatcaagctaaaatttatgttgacggtgtattggtaggagagcataagggaggttttactccttttgaagttcttgttcctgaatgtaagtataataatgagaaaattaaggtatcaatttgtgctaataacgttttagactataccacgcttccggtcggaaattatagtgaaatcattcaagaagatggtagcattaagaagaaagtacgtgagaattttgatttcttcaattatgcaggtgtgcatcgtcctcttaagttgatgatacgtcctaaaaatcatatttttgatattacaattacaagtcgtctatcagatgatttacagtcagcagatttacattttttagtggagactaatcaaaaggttgacgaagttagaattagcgtttttgatgaagataacaaactagtgggtgaaacgaaggatagcagattatttcttagtgatgtccatctttgggaagttttaaatgcctatctgtacacagcgcgtgttgaaatttttgttgataatcaactccaagatgtctatgaggaaaattttggtcttagagaaatagaagtgacaaatggtcaattcctattgaatcgcaaacctatttattttaaaggatttggtaaacatgaagatacgttcattaatggcagaggtttgaatgaagctgctaacttaatggatttgaatcttttgaaggatatgggggcaaactcttttagaacatcccattatccttattctgaagaaatgatgcgtttagcagatcgaatgggagtgttagtgatagatgaggttccagcagtagggttatttcaaaattttaacgcttccttagatttgtcaccaaaagataatggtacgtggaatttgatgcaaacaaaagcggcgcatgaacaagctatccaagaattagtgaagcgtgataaaaatcatcctagcgtcgtgatgtgggtagtcgctaacgaaccggctagtcatgaagcgggagcacatgattattttgagccattagtaaaactttataaagatttagaccctcaaaaacgtcctgtcaccttggttaatattttaatggcaaccccagatagagaccaagtgatggacctggttgatgttgtctgccttaatcgttactatggttggtacgttgaccacggtgatttaacaaatgcagaagtaggtataagaaaagagttattagaatggcaagataaatttcctgacaaaccaattatcataacggagtatggcgctgatacgttaccgggattacattctacttggaatattccatatacagaagaatttcaatgtgatttttatgaaatgagtcatcgtgtttttgatggtattcctaatttagttggtgagcaagtctggaattttgcagactttgaaactaatctgatgatacttcgtgtacaggggaatcacaaaggtctcttttcaaggaatcgccagccgaaacaagtcgtcaaagaatttaaaaaacgctggatgactattcctcattaccataataaaaaaaatagtgtaaaataggggtagttattttagaagaggtgatgatatggctagacccttagtagaacaaacagcagatcgtctattgcatttaattttagaaagagaataccctgttggtgctaagctccccaatgaatatgaattagcagaagatctagatgttggtcgcagcacaatccgagaagcagtcagaagtttagcaacgcgtaatattttagaagtcagacagggctctggaacatatattagttctaaaaagggtgtttctgaggatccattagggttctctctaataaaggacacagataggttgacatcagatctctttgaactacgccttttattggaacctcgaatagcagagctggtagcttatagaattacagatgatcagttacaattactcgaaaagcttgttggagatattgaagatgctgttcacgcaggcgatccgaaacatttacttttagacgtggaatttcattccatgctagctaaatacagtggtaatattgcaatggatagccttttgccagtcatcaaccagtcaattcatctgataaatgcgaattatacaaatcgtcagatgaagtcggatagtttagaagcacatagagaaattatcaaagcaatccgagaaaaaaatccagtagctgcacatgatgctatgcttatgcatatcatgagtgttagacgttcagcattgaaagcttaatataagaagaaaaatagctattcttgaatagctatttttttagtattcttcttgacaattcatcagatgacttatataatatagttaaagataacggttacattttgggaggtattatgttaaatcaattgaaaaacaactatttctttgctgttattcgagggaaatcatctgaggatgcgctcgaaatcgcaaagcatgctattttgggtggtattcggaatattgaagtaactttttcgactcctgaagcaagcaaagtcatcaaacaattatcagatgactttaaaaataataaagaaattattgtgggggccggaacggtcatgacaactgaacttgctaaagaggctattgatgctggagctaaatttttggttagcccacactttgattcagatattgctaatttagctaatgaaaacaaggtttattatttcccaggctgtgcaacggcaacagaaatcgtggtagctagaaagtataaatgtcagattataaagctttttccaggtggagttgtgggtccaggttttatcaaagatattcatggtcctattccagatgttgatttaatgccatcaggtggcgtctctgtttcaaatgtagttgaatggagaaaagcaggagcagttgcggttggtgttggctcagcattatctagtaaagtagccacagaaggctatgatagtgttactaaaatagctaaacagtttgtttctgcacttgattagtgagtaagagaagaatatggcgtttaatactgaaacatttatgttaaaaaatcaagcagctatacagctgtatgaagaggtcaagagacaacctatttttgattatcattgccacttagatccaaaggacatttttgaagatcatatttttgataatattgtggatttgtggcttggtggtgaccactataaatggcgtcttatgagggctaatggtatttctgaagcagaaattacaggtccagcatccaaccttgagaaatttaaagcatttgctagaacactagaaagagcatacggtaatcctgtttatcattggtctgctatggaattgaaaaatgtctttggtgttaatgagattttgacagaatcaaatgctgaggaaatttatcatcgtttaaatcatttcttgaaagagcataaaataagtcctagacgtttaattgcagatagcaaagttatgtttattggtactacagaccaccctcttgatactctcgagtggcataaaaagttggctgctgatgagagttttaaaacagttgttgctccgacatttaggccagatgaagcttttattgaacatcgacattttgttgattttattactaaactgggtgacattactcaaaaagagattacagatttttcaacatttatagcagcaatggaagaacgcattgcgtattttgctcaaaatggttgtagggctagcgatatcagttttacggaaatcgtctttgaacaaactgatgaattggagttgaacgatttatttaataaagtttgtgaaggctatatcccaaatcaatcagaaatcagcaaatggcaaacagctgtttttatggaactttgccgattatataaaaaatatggttttgtaacacaggtgcattttggagctttgagaaataatcattctactatttttgaaaaattgggagctgacgtgggtgtggattcacttggtgaccaagtggctttaactgttaatatgaaccgtttattggattccttggttaaaaaagatagtctgcctaaaatgatttggtataatctcaatccagcttacaatatagcagtagctaacactttggcaaattttcaagctaacgaacttggagtgagatcttaccttcaatttggtgcaggttggtggtttgcagatactaaattagggatgattagtcaaatgaatgccttagcagagcaaggcatgttggcgaattttattggtatgttaacagattctagaagttttctatcttatcaacgtcatgactattttcgacgtattttatgtacctacttaggagaatggattgaagaaggagaagttccagaagattatcaagctttaggaagtatggctaaagacatcgcttatcaaaatgcagttaattattttaagaactaaaaaggaagagtgaaatcatggaaatgtcatttaggtggtatggtgaagacgaccccgttactttagaaaatattggtcaaattccaacaatgaaagggattgttacagcgatatacgatgtaccagtaggagaagtttggtcacgtgagcgcattcaacagctgaaagaaaaggtagaggcagcagggcttaaaatttcggttatcgaatcagtacctgttcatgaagatatcaaattgggacgtccaacacgtgatctcttgattgataattatattcaaaccgtcaaaaatttggctgcggaaggtattgatactatttgttataattttatgccagtatttgactggacacgcactgatttagcatatcaatatccagatggttccacagctttgatatttgatgagacggtttctaaaaaaatggatccagtaaacggtgaattatctttgccaggatgggatgccagctatagtaaagaagaaatgaaggctatcatggatgcctatgctgaaattgatgaggaaaaactttgggaaaatctcacttattttattaaacgtattattcctgaagcggaagccgtaggcgttaaaatggccattcatccggatgacccaccatattctatttttggtttacctcgcattattactgggttagaggctattgagcgttttgtgaaattgtacgatagtaaaagtaatggcatcactttatgtgtgggttcttacgcttctgatccccagaatgatgttttagagatttcgcgacgtgcttttgagttagatcgtgtaaactttgttcatgctcgcaatattaaattaggtgatggaaagtcatttaaagaatcggctcatccatcagaatacgggtcaatagacatgtatgaagttattaagttatgccatgaatttgggtttgagggtgctattcgacctgaccacgggcgtatgatttggggagaaacaggtcgtccaggatatggcctatacgatagagctttaggagccacttacgtttctggtttatacgaagctgtgattaaaggttcaaaataaggcgatgcttccaaatttctcctgttccaatctcctgaaagagaaatttggaaagttattatcataatatgattgtacttagctaagagtagaatacttatagaagttaatgagaggaataagatgtcaaaaacaattacatttaccaataaagttgtcgtcataacaggtgcaggcggtgttctctgtggttatatggctaaagaatttgcgaaagcaggcgctaaagtggcattattagatttgaatcaagaagctgctcaaacatttgctgatgaaattgtagaagaaggtggtatcgctaaggcttataaagctaacgttttgtctaaagaaaaccttgaagaagtgcatcaagccgttttagaggatcttggaccaactgatattttagttaatggtgcaggaggcaacaatcctaaagctacaactgataatgaatttcacgaattagacttaccttcagaaacaaaaaccttctttgagttagatgaagctggtattagctttgtttttaacttaaattatttaggaacattattgccaacgcaagtatttgcccaagatatggttggacgtgaaggagcgaatattattaatatctcttcaatgaatgcttttacccctctgaccaaaataccagcttattctggagctaaagcagctattagtaacttcacacaatggctagctgttcatttctcaaaagttggtatccgttgtaatgctattgcacctggtttcttggtaacaaatcagaaccgaagcttgttatttactgaggacggtcagccaactgcgcgtgctgagaaaattcttaataatacaccaatgggaagatttggagaagcaagtgagctgattggcggattgttctttttagcagatgaaaaatcatcaagttttgttaatggcgttgtccttccgattgatggtggatttgctgcttactctggtgtttaatttacaagataatagccacttaacacataagagattattgagttgagtggttttttaaggaaatttgtttaatgatcttaccactaaatgatgggtaggttgctaattggaaaatcctcataagttagataaatttagaaactggagataatatggtagatacaaatcacaaaatcgctttttgcatagattctgatggttgcgcaatggatacaatgacatataagcatcaactcttttttggtccaattgctgcagatatatttgggatatcagaacaagaaagaacaagttttttaaaagagtgggatagagtcaatctttattcaagaactcgtggagttaatcggtttgtgggattggttatgggccttgagtttgccggagtagaacatattgataaattaaaagaatgggtcgaaacaacagactcattgtccaataattccttagagttagcgcttgccaacgattttagtagagatttagagaaggctttagaatggtccaatgaagtgaatcgccaaatcaaaaattatgagggagattctttagcgttttcaggtgtgttagaaagtttagaacgattaagtcaatttggtaatgtttatgtcgtgagttctgctaacaaggaagctgtttggcaagagtgggaagaacagggattgctaaagtatgttgatgatatctattgtcaagatagaggtaaaaaagaagatgttatcgccactttaattgcaagtggttactgccgtgaaactattttgatggtaggagattccctgggtgatctggctgcagcagaacaaaatggtattgcattttacccagtacttgttggtaaggaagtcaaatcatgggaaattcttagagaagatattggtgaagcttttgcaaaaggtcaattcgaacagcaaaggcaaaaagaatctattaataccttttgggctaatttagataactaatagaaaggataggctatgacacatttagttgacttaacaaagaaacccttcaatctaaatcaagaagcaattgagtggattgaaaaaacaattaatgagatgacattggatgagaaaattgggcaactttttttcaatatgggagctagtcgttcagaagaatatttaacagatgttttggatcggtatcatattgctgctgttcgctataatagaggtagttcaagtgaaatctatgatcagaatttaattttacagacaaagtcgaaattgccgatgttgattgctgcaaatacagaagctggtggagacggtgctgtcacggatggaactaaagttggcgatgaaataaaagtggctgctacaaatgatccgaaatatgcttatgaaatgggaagaatcgcagggatggaggcatctgctgtgggttgtaatgcttcattttctccaattgtagatttgacacgtaattggcgtaatcctatcatagctagtcgaaattggggtgctaacgttgatcaaattatttcactttcaaaagagtatatgaaaggaatcatgcaatataatattgtacctttcgctaaacattttccaggggatggcattgatgagcgtgatcatcatttgtcatttgcttccaatcctatgagtaaagaggagtggatgtcgacatttggccgcatttatggtgaattggctgacgcaggtttaccaggagtcatggcaggtcacatacatttaccaaacgttgaaaaagaaatgcatccagagcgagaccttgatgatatgttaccagcttcattgaataaaacacttttagatgagttattgagaggagagttaggttataatggagctattgtaacggacgcttctcatatggttggaatgactgcttcaatggcaaggagagatttgttgccaacggcgattgaagcaggttgtgatttattcttattctttaatgaccctgatgaagacattcaatggatgaaagaaggttacgaaaaaggtattctaacagaggaacgtctccatgacgctttacgtcgtactctcggtctaaaagcgaaattaggcttgcataactatgagggacgtcgccaagaactctttatgcctaaagataaggctatggctttaatcaacacattagagtcgcaaaaaatagctgatgaagttgctgataaagcagtaactctggtaaaagataaacaaaaagatatctttccagtaaatccagaacgttatcgtcatatcttacttgttaacgttgaaggatataagggaggttttggtgcgatgattgctggaaacaagcaacgtgcatcggattacatgaaagagttacttgaggcacgtggccatgaagtaactgtctgggagtctaccgaagagcgtattatgaaattgccacaagaggagcgggcagcagctatcgctaatgtttacgcacaaaaacagccaatcgcaaatctaacagaacactatgacttgattattaacttggtagatgtcaatgctggaggaacaacacaacgtattatttggccagcagctaaaggcacccctgatcagcctttttacgttcatgaaataccatctattgtgatttcagtacaacatgcatttgctttagcagatatgccacaggtagggacttatattaatgcttatgatgggcttcctagcacgataagtgcagtagttgcgaaattggctggagaatcagaatttacaggagtttcaccagtagatgcttactgtggtttaattgatacacatttatggcgccaatgctaatagaaacaagatgatgtacttttatgtaacataaaaaaagagcttaaagctctttttttatccttcaaaatagagtagttccttgggtgttttggtaaatacttcaaagccggttttagtcacataaccgcagtcttcaattcgcacaccaactttatctggtatataaatacctggttcaacagagaagcacatgccttcttgaatctccatatcgttaccagccataatagatggaaattcatggacatccatacctaatccatgaccaaggcggtggttaaagtattgtccataaccagccttttcaataacatttcttgctgctgcgtcaacttcagaagcaaggactcctggcttaataaaatcaatagccgcttgatgtgcttcaagacataaatggtaaatatcttttttgaattgatcaggtttccccactgctactgtacgggtcatatctgacgtataacctagtgtttctacacctaaatcaaataataacaaagcattattttcgattttattagttcctgggataccatgtggatttgctgcattattgccagtcaaaaccatagtgtcgaaactcattttattgataccttgttttttcatttcaaattcgatttgagcgataatatcggtttcagtgttgtttagcgagatattgtcaaatccaacttgaacagctttatcagcaaattctccagcgactaacattttctcaatttcatctcgtgatttaattaggcgcatgttttgaatataaggtgttaggttttcaaaatgaccatcaaaaacggtttggagaccttggaatttagtaacattaagattatcaaattcggctagaactttagaaacagaaaaggatggtaagttgctagctattttttgccaaggattttctgaatctatgtaaccaaagacgggaaatggtacactttgttttgcacgcgatacttctagtgctggtacaaataaaataggatcgcgatcttcatagacaaataaaaacatttgtctttcatggggatcgcaaaagaaacctgttaaatagttgactgtcacaggatcagaaaagacagcaagttcagcttggactgaatgtaagtgatggcgtatacgattaagttttgacataataacccttcttcctaaaaggaacttagtctagttaggctagtttcttatgcctattatttttccaaaaaaataggaaaaaatcaagtttagttagtattttgaaagtttttcataaaaaagctttataaaagcttgaaagtgtttccaaaaggtgataaaatatcagtgaaagcgtcattttcaaatagaaaggaagttaaatcaatatgaatacagatgatacgattacgatttatgatgttgcccgtgaagcaggtgtttcgatggcaactgttagtcgtgtggtaaatggaaataaaaatgtcaaggaaaatacacgtaagaaagtccttgaagttattgatcgtcttgactatcgtccaaatgctgtggcgcgtggtttagcaagtaaaaaaacgacaactgttggtgttgtcattcctaatatcgcaaatagctacttttcaattttagcgcgtggtattgatgatattgcagcaatgtacaaatataacattgtccttgcttcaagtgatgaagacgatgataaagaggttaatgttgttaatactttgtttgctaagcaagtagacggtattatttttatgggacaccacttaactgaaaagattcgtgcagagttctctcgttcacgcacaccgattgttttagcaggtactgtggaccttgagcatcaattaccaagtgttaatatcgattacaaagcagcagcagttgatgttattgatattttagctggcaatcataaagacattgcttttgtatcaggaccacttattgacgatattaatggcaaggttcgtttggcaggatacaaagaaggtctcaagaaaaatggcttaaactttaaagaggggttggtttttgaagccaactaccgttatgctgaaggctttgcattagctcaacgcgtgattaatgctggagcaacagcagcatatgttgctgaggatgagttagcggcaggtttgttaaatggtctttttgaggcaggtaaacgtgttcctgaagattttgaaattatcacaagcaatgactcgccaatcgcacaatatacacgtcctaacttaacttctatcagtcaaccggtctatgatttgggtgctgttagcatgcgtatgctaacaaaaattatgcacaaagaagagttggaagaaaaagaaatagtgcttaatcacgggattgttaaacgtggcacaacaaataattagtgttagagtatgttatttgaaaaatagtggtagaatggtagtagcttagcgcttaactttctgatacttaacatgatatattgagaggattagggtagcttagcttcctaatctttttttagaggtgtaatatgacaaatgaattgataatgcaagcttttgagtggtatttacctagtgatgggaatcactggaagaaattagaggagtctatatcagaccttaaaaaacttggaattagtaaaatctggttaccaccagcatttaagggaactagcagtgatgatgtaggatatggtgtttatgatctctttgatttaggagaatttgaccagaatggaacaattagaacaaaatatggtaggaaagaagagtatctaaagcttattaagtcgttaaaggcaaatggcattaaaccgtttgcagatatcgttcttaaccataaagccaatggtgatcataaagaaaaatttcaagtcatcaaagtcaatcctgaaaatcgtcaagaagcattaagtgaaccctatgagattgaaggatggacgggatttgatttcccaggtagacagggtgagtacaatgattttaaatggcactggtaccactttactggtttagattacgatgctaaaaataatgaaacagacatctttatgattgtaggcgataataaaggttgggcagacgatgatttgattgatgatgaaaatggtaatttcgattatctcatgtacaatgacattgattttaagcatcctgaagttataaaaaacttacaagattgggctaagtggtttattgaaactacaggcattgaaggttttcgtttggatgctgtgaaacatatcgattcttactttattcaaactttcattaatgatattcgtacaaaaataaaacccgatttagaggtctttggcgaatattggaaatctgaccaaacatcaatgaaggactatttagaggcaacacaatttcaattttctcttgttgatgttaccttacatatgaatttttttgatgccagtcaccaaaaccgtgattttgatatgcgaacaatttttgatgatagtcttgttattgataatcctgagtatgctgttacattcgtagaaaatcatgatacgcaaagtggacaagctctagaaagtagagtggaagattggtttaaacctttagcttatggcttgatacttttacgccaacaagggactccatgtcttttttatggtgattactatggcattcaaggagaatttggtcaaccatcctttaaagaggttattgataaaatggctgagctacgccaaaactatgtatttggcaaacaagtcgattattttacgcattcaaattgtattggttggacttgtcttggggatgaggaacataattcttgtttagctgtggtcctaacaaatggtgatcagggatggaaacatatggaagtaggggaaatttatgcaggcaaaacgtttgttgattatttaggtaattgtgaacaagaggttgttataggagatgatggttggggtgattttttagttgaatctgcgtctatctcggcttgggttcctaaaatagaggaagctaactgataaatcaggtgaaaaaaaaggtaaaatgagatataataagacctatgaaagttttactgtatttagaggctgaagaatacttgaaaaagtcaggtatcggtcgtgctatcaaacatcaagagaaagctcttcaaattgctgggatagattataccactaatcctacagatgactttgaccttgttcatatgaatacctatggtattagaagttggcttttgatgagtaaagctaaaaaaactgggaaaaaagtaattatgcatggccattccactgaagaggactttagaaattcttttattggctcaaatttagtatccccgctttttaaatggtacctttgccgtttttatcaaaaagcagatgccattataaccccaactgattattctaaacaactaataaaagcatatggcatcaagaaaccaatttttgttttatctaacgggattgatctaagtcgctatcagaggtcagaaaagaaagaatctgcatttcgtcactattttcacttaagtaaggatgataaagttgttatgggggccggtctttatttcatgcgtaagggaattgaccaatttgttgaagtagctgcaaaaatgcctgatattcgttttatttggtttggagaaacaaataaatgggttattcctcgaaaggttaggcaaatcgttaccaagcaacatccctcaaatgttacttttgctggttacataaaaggtgatgtttatgaaggtgccatgagtgctagcgatgctttcttctttccgagtcgtgaagagacagaagggatagtagttttagaggctttagctagtcatcagcatgtggttttaagagatatccctgtgtatcacggttgggtgaccgaagacagtgttgaattagcgactgatgttgatggttttgttgaaaagttggataaagtcttatctggtaagagtgataagattaaagaaggttatcatgtggctgagagtcgaagtatcgaacgaattgcccatgaattggcaagtgtttatcaaaaagtaatggagttgtaagatgcgtataggtctatttacagatacatacttcccccaagtttcgggagtttcaacaagtatccgcactttaaaggaagggttggagaaggaaggacacgaagtttatattttcacaactaccgaccgtaatgtcaaacgttttgaagaccctacaattattcgtttaccaagtgtcccttttatttcttttacggatcgtcgagtagtttatagaggtttaatttctgcttataggatagctaaagactacgaacttgatattattcatactcaaacagaattcagcttagggcttttaggaaaattagttgcaaaagctttaagaatacctgttgtgcatacttatcatactcaatatgaggattacgttggttatatcgcaaaaggcaaattgattaagccaagtatggtcaaatatatcatgcgtacctacctaagtgatttggatggtgtcatatgtccttctcgaattgttctcaatcttctagatggttacggtgtcaaaattccaaaacaagttattccgacaggtattcctgttgagaactatcgtcgagaggatatctctgaagaaacaatcaagaatctacgaacggagcttggacttgcggataatgatacaatgctattgagtttatcacgggtatcttttgaaaaaaatattcaagcaatcttgatgcatttatcagctgtcgttgatgaaaatcctcacgtaaaattagtgatagttggagatggtccttatctttcagatctaaaagaacttgttcactctttagaacttgaaaattcagttatttttacaggtatggttgagcatagccaagtggctatctactataaagcatgtgatttctttattagtgcttcaacaagtgaaacgcaaggattaacttacattgagagtctggcgagtggacgtccaatcattgcgcaaagtaatccttatctagatgatgttatttcagataaaatgtttggaactctgtacaagaaggaaagtgatttggcagatgctatcctagatgcaatagcagagacacccaaaatgactcaagaagcttatgaacagaaattatatgagatttctgctgagaatttcagcaagtctgtatatgctttttacctagactttctgatttcacaaaaagctagtgtgaaagaaaaagtctctctgacaataggaaataaggatagccattctactcttcgttttgtcagaaaagcggtatatttacctaagaaagtttttacctttacaggaagagcctctaaaaaagtggtaaaagcacctaaacgtcgtatttcatctattcgagattttttagattgagacgaataaaattagtaaatgtcttgaaattataaaaaatattgttataataaaaaatgaagacatgttaggttctaatagattttaagagcgagcactggttggtggaaagagtgcaattagagaacttagtactacttccttgattttatgcaaacataaaagggtggttcccttatcgccactagaggtctgacacaagtatactcgagtttttgtgttggataaattgaggtggaaccacgtagtctttacgtccttttggatgtaaaggctctttttttataaaagaagtggttgcataaaagaggcagattgctttgctaatgttatacttattatccctagctaggataatgtggaattcaatcaaaggtcaatccctttgtttattagtgaattaatgtgtttaggaattggtatcatcctaacagttattaagaaaaggagaacaagatgattaaaatcactttcccagatggtgcaattcgtgaatttgaatctggcatcacaacatttgaaattgcacaatcaatttctaactctttagctaaaaaagctttagctggtaaatttaatggtcaacttattgatacaacacgtgctatcgaagaagatggtagtattgagattgtaacacctgaccacgaagatgctttaggagttcttcgtcactcagcagcgcatttatttgctcaagctgcaaaacgcctttttccagacttatgtttaggtgtaggtccagctattcaagatggtttttactacgatactgataataaatcaggtcaaatttcaaatgatgatcttcctcgtattgaagaagaaatgaaaaaaattgttaaggaaaatcacccttgtattcgtgaagaaatcagtaaagaagaagcgttagaactttttaaagatgacccttataaagttgaattaattagtgaacatgctgaagatggtttaactgtttatcgtcaaggtgaatttgtagacctttgtcgtggacctcatgtcccatcaacaggacgtattcaagtctttcatcttctaaatgtcgctggtgcttactggcgtggtaacagtgataatgctatgatgcagcgtgtctatggtactgcttggtttgataaaaaagatttgaaagcatatcttaaacgccgtgaagaagctaaggaacgtgaccatcgcaaattaggtaaagaacttgatttatttatggttaatcctgaagtaggtcaaggattgccattctggttgccaaatggagcaactattcgccgcgaattggaacgttacattgttgataaggagattgcttcaggttatcaacacgtttacacacctccgatggcatctgttgaattttacaagacttctgggcactgggaccactatcgtgaagatatgttcccaacaatggatatgggagatggagaggaattcgttcttcgtccaatgaactgcccacaccatattgaagtttataaacatcatgttcattcatatcgtgaattgccaattcgtatcgctgaacttggtatgatgcaccgttatgaaaaatcaggggccctcacaggattgcaacgtgtacgcgaaatgacactcaacgatgcccatattttcgttacacctgagcaaattaaagatgaatttcttaaagctcttaatcttatagcagaaatttatgaagattttaacttaacagattaccgtttccgcttatcttatcgtgacccagaagataaacataagtattatgataacgatgagatgtgggaaaatgcacaagctatgctaaaagaggctatggatgattttggattagattattttgaagcagaaggcgaagcagccttttacggtcctaaattggatatccaggtgaaaactgctcttggtaatgaagaaacactatctactatccaactagatttccttcttccagaacgctttgatctcaaatacatcggtgcagatggtgaagaacatcgtccaattatgattcaccgcggtggtatttcaacaatggagcgctttacagctattttaattgaaacttacaaaggtgcctttccaacttggcttgctccacaacaagtttctgttattccaatttcaaatgaagcccacattgattatgcttgggaagtggctcgtgtccttaaagatcgtggtattcgtgctgaagtagatgaccgtaacgaaaagatgcaatataagattcgtgcggctcaaacccaaaaaattccatatcaattgattgttggtgataaggaaatggaagaaaaagccgtaaatgtgcgccgctatggaagcaaagcgactgaaacaaaatctatagaggaatttgtagaaagtattttagctgatattgcaagaaaatctagacctgacgaagttaaataaattttattagtcattataaaaatcattaataaatgatgtgaactgattactgtatgatgcagaatcagttttttagatgctaattttttctttatgtttaattataagctaattatagataaataatctcatataacattcacaaaattagatttttttggtataattaatatgattgacacataaaggaaaatagtattaataaaaaggggtatggagcattgcgaacagtattagtagtgcaaggtgatgacgaaacaatagagttattaaggtcgtatttagagggagctctttataaggttgtgatggctagtgatggtgaggaggctttttctttatttcagcaacatcagattgatttagcaatcatagatattacgctacctaaaatagatggatatgagttgacgcgactcattcgtcaagatagtcagattcctattattatgctagcagctaagacaacagatatggacagaatattaggattgaatattggagcagatgattttatcacgaaaccgtttaattctttggaggttttagctcgaattaattcgcaactgcgtcgttactatgaattcaatagtcttgccaaacctaaaaatcaatttataaagataggggaattggaattagatgaggaacatgttgaactaactaaaaatggtaaacatatcaagttgactgctacagaatttaagattcttcatatcttaatgtcatcaccaggaaggatttatactaaaacacaactctatgagaagattaatggtaggtatttagaaggtgatgagacaacgattatggtgcatatttctaatatccgtgacaaaatcgaagatgatagtaaatatcctaaatatataaaaacacttagaggagtaggatataaaatcgaaaaaccgcagtatcttgtttaaaaatataatggctagtaagagccattttttagtgaagatatttcttggttttaagctttcctttttgctataataagtaaaattggaggggagagatatggcaaagaccgctcttaatattccttttacagttgaagggatagaaaattattatcaaaatataaaaatgatactgtctttagcagataaatggagcatacctaaagatgatctattactttttttaaagggcctcaaggctattgatgatataaaagttggctctcctatttttaagtatttttggacttctttaagtttacaagcacccctcaaagctttagaattcgtgttagagcaggctaaaatgccaactgaattgtcaggagaattatcagaaacacaatacttggtcgcacagttttcagatgagttagctccacatgatgatttctggatagccttatcacaagttatttatgattcttttcctgggaatagtctagccgaagatactgtattaaataggaaactccatcaattccgctatttgatttctagtcagcaagcacagtatgttcgacgatactttaaagatgttggtatgactgatagagatgctttagtaaactacctatcatgtttaagagaaccagatagtatcgcctactatgaatctgctcgcttgcataataaacgtcggagaaatggtgaaatctttggtttcccagatgatgagccggttattaatagtaagcttttaatttcattccatacggaatttattattgatgacaaaggaaactttttaaacgagattgacgcagaagtaataacacgtaatggtattatcaatggagctagctttaattatgcttttaaaaataatacacgtcataaagaattagatgttgatcctgtaaagttagacccaaaatttcgaaacgatatgactagaggttatagatcgccaaatctatctagaaggaaatggtttttctttaaagaagaggattacgattgtagttatttcaataaaaaaggatattacgcatttggaaggcgtagtgctaagcaatcggttgataaacaagtcaaatacttgaagaaggctgtgcagaaaatgcgcatcaactgatacatatactattaaaagataccatagtactatggtatcttttaatttgaggtattaatgtcaaatggttttttattgaccacatgtttttataaacgagtggtcaaaattgaagaagtatctagcttatgttaaaatataattgaataatagaaagaaggtgctgtatgattaagaaaaataaagtttttttaggagttcttttagtccttgttgttatccttggaggtggtgtattattttaccaatcacaattccaaaagacaactaatcaagcgttagctattgcttataaagatgctaaagtggctaagaaggatgtcatacatcaaaaaattgacaaagaatttgaaaactttagagggagctacgaaattgaattcaataccaaaagcgcagaatacagctatcatgtagatgttaagactggacaaatccttgagcgggacatggataataatggcttttcaaaatcgacttctcagtcaagttcatcgtcaagtcaaaaatctcataaaataagtcaagaagaagccaaaaagattgcatttaaagatgctaatatagaggaatcagaagtcagtaatcttaagatcaaagaagaaattgaaaatggaaaatcagtttatgatattgactttgtggacctgaaaaataaaaatgaagttgattatcaaattgatgcagaaactggaaaaatcattgaacgttctagagatcatatgaatgattaatttaaataagatataaaaaaacgaaggtctaaaaggccttcgttttaattactcagtagcttgctcccaacgttttgaaagtttacgtgaaaaacttgagatgataaagtttgtaatgaaatagacagcagttataatagcgtagagtgtaaaaacttgtccagcttcgaaatatcttcccattagaatttgactttttccgaagatttcttgaatagctataacagaataaagtagtgatgtatcttttataaccgttacaaactgagaaataatggctggcaacattttgcgaaaagcttgtgggaaaataataataatgaaaacttgcaaataagtgaatccttgagaaagtccagcttctgtttgtcctttatcgactccatttaaacctccccgaataatttctgctaaagcagcggaggtaaaaattgtaaacgaagtaataccagcgctgactgatttcatctggaatactaagaaaatgataaaaatccaaagtagatttggaacatttctgacaaattcgatatagatactagctattaatttccagataggatttttgctatttctcataattgctaatagagttccaaaaaacattgatagtaaaatggaaataaaagatatatataaggttaaaccgaacccttgaaggagaaatagtatctttgttagtgttaagactgatgacatatcaaacctccttaagaataagttttcttatttaattcttcttgttttcttgcccagcttgctagtgggaaacaaataacaaaatagaagatagcagctcctgcaaaagctgggatataattagtcgtatcataagcccaggccttagctacaaacatgatatcggctccagaaatgattgctacggtagaggtattcttgattagattaacaacttggttggtcattggtggtaaaattgttctgacagcttgaggcaaaatgataagttgcatggtttgattagctgtgaatccttgagctaaagcagcctctgtttgtcctttagggacagcttcaattcctgagcgaataacttcagaaatataggcaccatggtatagtccaacgcacaaaacggcggtgaaaaaagcactaatcataacatgtccattactaatgattgctagtccatagtagacaaaaaccatttgaactaaaagaggtgtgttttgaaaaacttcaacatagatacgtgatatcaacttaccaactttacttttagaagttgataaaccaccagagagaattcctaatatcagagcaagtaggagtgcaccaaacgaaatacctagagtatataagaagcctttaaagaataggtcgaaatggttaaagaaagcgccccaccttgaaatggcaaaaggactgatgtttaataaagtcataaaaaatcctccctattctttttttactttagcgggtttaagcttaaatttttgataaatgtgttttaaactaccatctttttcccatgataccagtaacttattaacgtagggaatcaagactttgtcctgtttactggttgcaataccgtattcttgcgtattgaacccttcttttaatatggttgtatgagggctaaggtagccgctaaggatagatttatcaactgaaaaagcatcaatacgattagcgtacagcgatatcgctaattctgggaaactccctaattgagcatagctaaattttagcttgtgttctttagcatatttttctaaattgacttttgtagtggcaccttgagccacaccaatgtgtttaccatccaattcttttatagttttgatatgactatttttacgcaccaaaaatccaatttcatcgtgataataagctttagaaatattatagttagcttttctttcgggcgtgatagtgtatgttgcgattagaatatcaatttgcccattgtccatcagaggctctctggtttgtgcggttgtcggtacaaaaactggtttgacacctaaggatttggcaatttttttggcaatatcaatttccattccttcgtattgattcgtctcagcattataataaccaaagttaggcacatcttgtttgactccaactttaaggacgcccgattttttgatttctgataattgattagctgacgttgagttaggataaaataacaggaaaataaaaatacaggataatagatagaacgttaatctttttcgtctcagcatatttcgtcctcctaaaggtcagtactggtatggttgataatgttgcttaaaaattgtttagcacgtggttctctgggattatcaaaaaagtcttgtacatctgtagtatccactaaaatttccccatcagccataaaaataatacgatcagcaacttctcgtgcaaatcccatttcatgagttacaacgaccatattcattccgtcatttgccaatttttgcatcactgaaagaacgtctccgatggtttcgggatcaagggcagaggtaggctcatcaaagaggaggagttttggatgcatggcaagccctctagcaatagcaattctttgtttttgaccacctgatagcatagatgggtaggaatcttttctttcccacatattgacaaattttaaatatttttcagcaatttccatagcttcttttttagattgttttaatactttaataggagctaatgtaatattttctaacacggttttgtgaggataaaggttaaaatgttgaaaaaccataccaacttctttacggaggttgaccaattctttagatgaaatatttgctaattcatgtccattcacgaccaaactaccatcgtcaatagattcgagagcgttcattgttctaataagtgttgatttacctgatccagaaggtcctaatagaacaaccacttgccctggctctatttccaaattaatctgacgaagggcgtgataatctccataatacttgttaacattcttataagatatgagtgacataagaacctcctaaaataacagtttattgttaggttacctaacattatagataagtgtatcacctgtttgtgagcttgtcaataaattcagaatattaaagagtaggattgatttaaatattgctatttttagagcggtatttttagtaaaaatattacgttctcgtatcatttatttttcagtttaataggatgtattgaaagtttccaattaactaggaaatctgttataattagtgataatagtggtgctttaggcccatattatcatattttcggtcacttttatttttcagtttatgaatggaagtgggagaccagaaagtaatagaggtaaaatatgaaaaaaatacttatcgttgatgatgaaaaaccaatttcagatattatcaaatttaatttaaccaaagaaggatatgagacggcgacagctttcgatggccgtgaagctttagtacaatatgcagaatttcaaccagatttaatcattttggatttaatgcttcctgaactagatggtttagaagtggctaaggaagttcgtaaaaccagccatattcctattattatgctttctgcaaaagacagtgagtttgacaaagtcattggtttagaaatcggtgcagatgattatgttactaaacctttttcaaatcgtgaacttttggcacgggtcaaagcacatttacgacgtactgaaaatattgaaacagctgtagcagaagaaagtgctcaaaatgcttcttcagatattactattggtgagttgcaaattttaccagatgcctttattgctaagaaacgtggcgaagaaattgaattaacgcaccgagaatttgaattacttcaccatttagcgacacatatcggacaagtcatgacacgcgaacatttattggaaacagtttggggatatgattattttggagatgtccgtacagttgatgtgacggtgagacgtttacgtgaaaagattgaagatactcctggtcgtccagaatatattttgactcgacgtggtgtaggttattacatgaagtcttatgaataatagtgctgcaaatattaggtcgtttgagctagccttactttttttactagtttttgttgctgtttattttgtttatctagcggttagagattttaaaatgtctaaaaatatccggcttttgaattggaaagtcagagatttgatagcaggaaattattcagatagtattctaattcaaggtgatgcagatttggtagaattaggtgaaagtctaaatgatttatctgatgtcttccgaatggcacatgataacttagaacaagaaaagaatcgcttagcaagtatcttaacttatatgactgacggtgtgctggctacagatcgttcaggaaaaatcgttatgattaatgagacagcccaacagcagttcaatctagcatatgatgaagctttatcaatgaatattgttgatatgttagggtcgggaagtccatattcgttccaagatttagtctctaaaacgccagaggtagttcttaatagacgtgatgaaaacggtgaatttgttaccttacggattcgatttgctttgaaccgtcgtgaaagtggttttatttccggtttagttgcagtgtcacacgatgctactgagcaagagaaagaagagcgtgaaagaagactttttgtatctaatgtttctcatgaacttcgtacacctttgacatctgtaaaatcttatttagaagctttagatgagggagcgcttaatgaagaagttgctccaagcttcattaaggtatctctagatgaaacaaatcgtatgatgcgtatgatatcagatttattaagtttatcgcgcattgataatgaagtaacgcatttagatgttgaaatgacgaattttacagctttcatgacctcaattttgaatcgatttgatcagattagaaatcaaaaaacagtcacaggaaaagtttatgaaattgtcagagattatcctcttaagtcaatttgggtggaaattgatacagataagatgactcaagtgattgataacattttaaataatgcagtcaagtattcaccagatggtggtaagatcacagttaatctacgcacaactaaaacgcagatgattttatcaatatcagaccaaggcttaggtattcccaaaaaagatttacctctcatctttgatcgtttttatcgtgttgataaggcgagaagtcgtaaacagggtgggactggacttggtttgtcaattgcaaaagaaattgttaagcagcataagggatttatttgggctaagagtgagtatggtaaagggtctacttttacaatagtcttgccttatgataaagatgctgtaacttatgaagaatgggaggacgttgaagattaaaacatgtcagaaataggatttaaatatagtatcttagcttcaggttcaactggaaattgtttttatattgagacaccccaaaaacgtcttttaattgacgctggtttaacaggcaagaaagtgactagccttcttgcagaaattaatcgtaaaccagaagatttagatgctatactagttacccatgaacattctgaccacattaaaggtgttggcgtattggctaggaaatatcaccttgatatttatgccaatgagcagacgtggaaagttatggatgagcgtaacatgttaggcaaagttgatgttagtcaaaagcatgtttttggacgcggtaaaaccttaactttcggggatttagatattgagagctttggtgtaagtcatgatgctgtggatccccaattttaccgtatgatgaaagatgataagagctttgtgatgttgacagatacaggatatgttagcgaccgaatggcaggcttgattgagaatgcagatggttatttgatcgagtcaaatcacgacattgagattctacgttcgggttcttatccttggacacttaagcaacgtattttatcagataaaggacatttatctaatgaagatggttcagaaaccatgattcgcactataggtaaccgtactaaacacatctatttaggacacttgagtaaggaaaataatattaaggaacttgctcacatgactatggaaaacaatttaatgagagctgactttggtgtgggcacagatttttctgttcacgatacttcacctgattcagctaccccactgacgaggatttaagattgaaaaagattttttacattagtttaggatttattagtttagggataggcattgcaggtattgtcttgccggtagttccaacgactccattagtattgctttcagctttttgcttttcgagaagctctgaaaaatttgatatttggttgcgtcaaactaaagtttataaatactacgctgcagattttgttgaaagcagaagtattgccccagcgcgtaaaaagtcaatgatttggcaaatttatatcttgatgggaatttcaatctattttgctcctctaatgtggctcaaactgggattattgattggaactattgtaggaacttatgtgcttttttatgtagtacctgataaaattgatgaatagttaacaagagactaggtgtgtatcctagtcttttgttgaatattcaaatatgtaattaaggaaacgttttctttggaagataggtttaacttccaaaatgtttgattatttgtcaactgtggtataatggtatttgtttaatattttatctatgattgaaatcaaggagaaaaaaatgaaagaattaagatcaaagctggaaaaagactatggtattgtttttgctaatcaagaattattagatacagcttttacccatacatcatacgcaaatgagcatcgcctcctaaacatttcacataatgaacgtttggaatttttaggagacgctgttctacaattacttatttcacagtatctttttacaaagtaccctcaaaaggcagaaggtgatttatcaaaattacgttcaatgattgttcgtgaggaaagtcttgcaggtttttcacgtctatgtggctttgatcactatattaaacttggaaaaggagaagaaaaatctggtggacgtaatcgtgacactattttaggagatttatttgaggcttttttaggagctttattattagacaaaggtgttgaagtggttcatgcctttgttaacaaggtaatgatccctcacgttgaaaaagggacctatgagcgtgttaaagattacaagacaagcttgcaagaattacttcaatctcatggggatgtaaaaatagattatcaagttactaatgaaagtggtccagcacatgcaaaggaatttgaggtgactgtatctgtcaaccaagaaaatttgagccaaggaattggacgatcaaagaaagctgctgaacaagacgctgccaaaaatgctttagcaacgttacaatgaggaaatcatgtttttaaaagaaattgaaatgcaaggctttaagtcctttgcggataaaactaaggtagaatttgatcaaggagttactgctgttgtaggtccaaatggatcaggtaaaagtaatatcacagagagtttacgttgggcattgggagaatcaagcgcaaaaagtttacgaggaggtaagatgccagacgttatatttgctggtacagaaaatcgtaagccccttaattatgcgcaagtgagtgttactttagataatagcgaccattttatcgaaaatatagctgacgaagttcgagttgaacgtcgtatttttcgaaacggagatagtgaatatttaatagatggacgcaaagttcgcttacgtgatattcatgatttatttatggatactggattaggaagagattctttttctattatttcccaaggacgcgttgaagctatttttaatagtaaaccagaagagcgccgtgccatatttgaagaagccgctggtgttctgaaatacaaaacacgtaagaaagaaacacaatccaaattagaacaaactcaagggaacttagatcgcttagaggatattatttatgaattggacatgcaagtccaaccattagaaaaacaagcaagtattgccaagcgttttttagtattagatgaggaacgacaaggactccacttatctattttgattgaagatattttacaacatcaatcagatttaactactgttgaggaaaagctattgacagtaagaaaagagttagcaacttattaccaacaacgtcagtcccttgaagatgaaaatcaatcgttaaaacagaaacgtcaccatttatctgaagaaattgaggctaaacagttagctcttttagacgttacaaagttaaagtcagatttggaacgccaaattgatctgattcgtttagagtcaaaccaaaaggctgaaaaaaaagaagaggcaggtcaacgcttagcagagttagaaattaaagctaaagattgtagtgaccagattacccaaaaaaatatagagttaactactctgtcggaaaaaatagcccaaataagatcagaaattgttagtacagaaagttccttggagcgtttttcaactaatccggatcagattattgaaaaacttcgagaagactttgttaccttgatgcaagaagaagccgacacttcaaacgctttaacagctttactagctgatatagagaatcaaaaacaagcttctcaagctaaatctcaagaaatacaagaagttagcaaaaatttagaagtattaaaaagtaacgcaaaggtagcattggaacgatttgaggctgcaaagaagaatgttcgtcagttattatctcactaccaagatttaggtcaaaccttgcaaaatctagaaggtgagtataagaatcagcagtcaattttatttgatcatttagatgaaatcaaatcaaagcaagcacgtatttcgagtttagaatctattttgaaaaatcatagtaatttctatgctggagtgaagtcagttctacaggctaaggaccagcttggaggtatcataggtgctgttagtgagcatcttagctttgacaaacattaccaaacagcattggagatagctttgggaggtagcagccaacacatcattgttgaagacgagagtgctgccaaacgttcaattgcttttttaaagaaaaaccgccaaggtagagcgacatttctgcctttaactacaataaaaccaagagaattagcacaacattatctctcaaaattacaaagttctcaagggtttttaggaatagctagtgaattggtaacctatgatcaacgcttgtcaaacatttttaaaaataacttagggttaactgctatttttgatacggttgataatgctaatgtagctgcgagacaattgaattatcaagtacgtttagtaaccttagatggaacagagttacgccctggagggtcgtactcagggggagcaaatcgtcaaaataatactgtttttatcaagcctgaattggataatctaaaaaaagaattgaaacaggcacaaagtaaacaattaattcaagaaaaagaagttgccacattgttagagcaactcaaagagaaacaagaaaccttagcacaacttaagaatgatggagaacaagctcgtcttgaggaacaaagagctgatatagagtatcaacaactatcagaaaagcttgctgatttaaataaactatataatggcttgcaattaagcagcggggcgttggaacaaactacttctgaaaatgaaaaaaatcgtttagaaaaagaacttgaacaatttgctattaaaaaagaagagttgacaacttcaattgctcaaattaaggaagataaagattcaattcaagaaaaagtcaataatctaacaacattattgtcagaggcacagctagaagaacgtgatttgctaaacgagcagaaatttgaacgtgccaactgtacacgtctagagattaccttgtctgaaataaaacgtgacattagtaatttacaaacattactaagccatcaggacagtcaattagacaaagaagagcttccacgtatagaaaaacagttgctacaagtaaataatagaagagaaaatgacgaagaaaagcttgtgagtctccgttttgaattggaggattgtgaagctgctttagatgatttagctgcttctctggctaaagagggacaaaaaaatgaaagtcttattcgtcagcaagctcaattagagtcacaatgtgaacaattatctcaacaattgatgatattctcacgtcaattatcagaagactatcagatgacattggatgaagcgaaggtaaaagcaaatgtcttggaagatattttgatggcgcgtgaacaattgaaatctctacaagctaaaattaaagctttaggacctgttaatattgatgcaattgctcaatttgaagaagttcatgaacgattgaccttccttaacacacagcgagacgacttagttcatgccaaaaatttattactagagacgattacagatatggatgatgaagttaagactcgttttaaatcgacatttgaagccattcgtcatagtttcaaagaaacctttgtacagatgtttggtggaggttctgcggaccttattctgacagaaggtgatttattatcagctggggttgatatttcggttcaacctcctggtaaaaaaatccagtctttaaacttgatgtcaggtggtgaaaaagcattatcagcgttagcattattatttgccattatccgtgttaagacaattccatttgtcatcttggatgaagttgaggccgctttagatgaagcaaatgttaagcgatttggcgattatcttaatcgatttgataaatcaagtcaatttatcgttgttactcaccgaaaagggactatgtctgctgctgatagtatctatggggtaacgatgcaagaatcaggcgtttccaaaattgtttctgtaaaattaaaagaagctcaagaaatgaccaattagaaaacagaaggggatcccttctgttttttggattttcagccttattttatgttacaatagtaaatgtaaaccctttagttaggagattccatgataaaattagtagcaaccgatatggacggtacattcttagatgaaaacggtacctatgataaaaaacgtttagcaaatgtgctaaaaaaatttaaagaacaaggaattgtctttacggcagcaagtgggcgttccttattatcacttgaacaattatttgctgactttcgtgatcagatggcttttatagcagaaaacggaagtgcagcagtcttatttaatcgcttggcatatgaacagcacttgagtcgagaacaatacttagatattattgaccatttgagtaagagcccttatatggagaataatgaatatgtcttatctggcaaggatggtgcatatattctaagtgatgccaatccagattatattgaattcatcactcattattatgataatttgcaaaaagtttctcactttgaagatgttgatgatattattttcaaagtaacggctaactttactgaagagactgttagacaagctgaggagtgggtaaatcaagctataccgtatgccacagcagtgacaacaggttttaaatccattgatattattctaagctcagttaataaacgaaatggtttagagcacctctgtgaacaatacggtattagagcagaagaagtcttatcttttggtgacaatattaatgatttagaaatgctagagtggtcaggaaaagctatcgcaacagaaaatgctagaccagaagttaaagagatagcagattgtattataggtcatcacaataatcaagctgtaatggcttatttagaaagtatggtggattaatgtcggatattaaaatacttgccttagatttagatggcactttatttacaacagataagaaagtttcagaagaaaataaagtggccttaaaagcagctagagaaaaaggtataaaagttgttattacaacagggcgtcctttaaaagcaattggtaatttgttagaggacctagagttagtatctgatgaagattacagcattacttttaacggtggtttagttcaacaaaatacagggaaaatcttagctaaaactgcaatgacacgacaagaagtggaagatatccatgaggagttgtatcaagtgggtttgccaacagatatcttaagtgagggaacggtatatagtatcgctaacaagggacaccattctcaatatcatttagccaacccgctcttagaatttatagaagttgatgatttagagcaagtgccaaaggatgtagtttataataaaattgttagtgttattgatgctacatatcttgatcaacaaattgctaaacttcctgatagacttaaagttgactatgaaatgtttaaatcacgtgatatcattttagaattgatgcctaaaggtgttcataaagcagtcggcttagaactactgacaaaacaccttgggttagatagtagtcaagttatggcaatgggagatgaagcaaatgatttatcaatgctagagtgggcaggcttaggagttgcaatggctaatggtattccagaagctaaggcaatagcaaaagcgacaactatttgtaataacgatgagtctggagtcgccgaagcaattgggaaatatattttaagtgaggaaaattaatgggattatttgaccgcctatttggacataagaaaaaagataaagaaccagaaattgaagcatcagaatctgttgttttagaagatgaagattcagttattgataaagaggagggcagcaacttttcgaaggagtcaactttgaatcgaacctctgaagtccctgttgcagaagatgattctttcttagaattagaaagagatacagcattgtcagaatcacatcaaccagttacctctgaaattcatcctttagagtcagaagataccgatgaaattcctgtaaaagaagacgatagttttttagaactagaagatagggctaagacaaaggtagcagatacttctgaggtagaaaatgtagttcctgattccacgactctttctgacaatgtttctgctaaatctgaggcatcttttagtgataaggagcaattaagtgatagtcaggcttcagatcagttttcagaaactccccttcaagaagagatgtctagtggaaaaactgaggtacaaacagagtcagaggatacatctgcggctgatgcttttttagcagattactatgctaaacgtaaagcaattgagaaagaaatctcgtctaattcgctgtcaacagatgagtcagaattttctgaggcacaggaagttttatcgcaatcacaggcagacactataaaagctgagagtcaagaggaaaaatataatcgtagcctgaaaaaaacacgcacaggttttagtgcacgccttaatgctttcctttctaacttccgtcgtgttgacgaagagttctttgaagaattagaagaaatgttaatcttatctgacgttggggtaaatgttgcaacacagttaaccgaagatcttcgttatgaagcaaaattagagaatgccaagaaatcagaggatttaaaacgtgttatcgttgaaaaattagttgaaatctacgaaaaagatggtatttataatgaggctatcaatttccaagaaggtttaaccgtaatgctttttgtaggtgttaatggtgttggaaaaacgacatctataggtaagttagctcatcaatacaagtctcaagggaaaaaagttatgttagtagcagctgatactttccgtgcaggtgctgtggctcaactagtagaatggggacgccgtgttgatgtaccagttgtcactggagaagaaaaagcagatccggctagcgttgtctttgatggcatggaaaaagccgttgctcaaggcgttgatgtcttgttaattgatacagcaggacgtctgcaaaataaagaaaaccttatggcagagttggaaaaaattggacgtattattaagcgtgtcgtacctgatgctccccacgaaactttgcttgctttagatgcatctacaggacaaaatgctttaagtcaagctaaagagttctcgaaaattacaccattaactggccttattctgactaaaattgatggtactgctaagggtggtgtggtactggctattcgtcaagaactagatattcctgttaaattcattggtttcggcgaaaaaatcgatgatattggtgaatttaattcagaagatttcatgcgtggccttctggaaggaattttataagaaaaaagaactttcatttagaaagttctttttatattaaaagacacgataaacataaggattattagctttagaaacttgacgagactcttcaatgtgtaagactggtaagttttgttgtaacaattgattatactcggatttaattgtacctctaacagttacccaagtattgtccggataacttttttgatttccagtcgttagtagaccataaactcctgaatcggcaatacaatgaatgattccaaagcggaaaataaattgatatccttcgtgtttgggttcgttataaacaaacccagtatattgtatttggcgatccatgaattgctcgggatagagataaattagttccataacttccatgtaattttcagttgtgatggttaatgtaccagagcctttatattttttaagctctttttgcatttctttttcataggctgaagaagtaaaataagtgctggtatctggtttcaaatattgaacgcgtgtcccatcttgacttacagtaccagtagagccggctgctagagggaaattatatcccttggcagagactgtggttgagtctaaactaactgtaggtactaacaaacctactaaaacgggaaatactaaaatcattgggcttgttgatttagctattttaccatgtaggtgactatgcattttcatatttttaacccaaataattagctgtacaattgctaaaataaaagataggaccattgaaatataggccaaataggtataatgagtattaatatactgatttagtttacctgataactttaaatacatgcttaattcaaaataaccagcaagaataagaaatcgaatcattatattacccccacaaataaacaatagataataataataagagaagatacactaatgaattggacaataaaccttgttttaaaagaatttaccatcatcattaaattcttaatatcaatcatgggtccaattaaaaggaaagccatcactggcgcgattccaaaggttgataataaagaagcacctataaaagcgtcagcttcactacacaatgacaagatgaaagcaagcaacatcataactaagatggctgtgatagggctatgtccgatagtagtaagaactcgagttggtaaataaatttgcatagctgaagcaattaaagtaccaaatactagatagcgtcctgtatcaaaaaattcatcgatggcatgagctaaggctagaaagattttttgataccacttcttatcagaataatcatgaaaatgagtaggtttagcgtcttcttttagaatattatcatctactaaaaaggcaagcatgactcctaaagcaatggctacaatggtagcacctacaaagcgtaatatcaggaagcgtatggaatttccaaatgctgagtaggtcgcaaataaaacaataggattaataataggggcagtagcaagaaacggaactgccgtgtatgaaggcactttcttttcaaggaatcgattaataataggaatgataccacattcgcaagaaggaaagacaaagccaacgaaggttccaaataagactctgagaaatttatttttcggtaagaacttattgactatatcaggtgttataaagacttcaataattcctgataaaatagttccaagcaaaacaaaaggaagtgcctcaataataatggaaatgaaaatggcaaaccattgaaggacactatccggtaattgattaaagatatccatagaacttaatctttctgagaatcatctttctgttcaggttttgaatcagaatcaacttttttaggttttggtactttagcaaaactagcgaacatactttctaagtcatcttgacgtttgtgcgtaatagccattaatggcacctctttctttatataataacctattatactatattagcttatttttaacataaaaaaacaaatcgattggaaatgatactatatagtgataaaatgttattagtagattgatgaggtaagattatgattgaattaggtattacaacattcggagagacaacaatccttgaagaaacaaaccaaagctattcacatcctgagaggattcgccaattagttgctgagattgaactagctgatcaagttggtttagatgtatatggtattggagagcaccatcgtgaagattttgcggtctctgcacccgaaattgtcctagcagcaggagcggttagaactaataatatccgtttatctagtgcagtaacgattctctcttccaatgatcctattcgcgtctaccagcaattttcaacgattgacgcactttcaaatggtagagcagaaattatggcagggcgtggttcctttattgagtcttttccattgtttggatacgatttagcggattatgatgatttatttaatgaaaaaatggatatgttgttagcaattaactcagcgacaaatctcgattggaaaggtcatttgacacaaacagttaatgagcgaccaatttatccaagagcattacagagacagttaccaatatgggtggcaacaggaggaaatgttgattctacaattcgtattgcagaacaaggtttgccaattgtttatgcaactattggtgggaatcccaaagcatttcgtcaattggtccatatttataaagaagttggtagtcgtaatggacacaaaccagaacaactaaaagttgctgctcactcttggggatggattgaagaggataatcaaaccgctattgaccgttattttttccctacgaaacagaccgtcgataatattgctaagggacgccctcattggtctgaaatgaccaaagagcagtatttacgttcagtaggtccagaaggtgctatttttgtaggaagtcctgaagtggttgcacataaaattataggacttgttgaagcacttgagttagaccgttttatgttacatctaccagttggctctatgcctcacaaagacgtcctaaatgctatcaaactttatggtaaggaagtagcaccaattgttcgaaaatattttgaaaagaattaaagcagatctggtctgtttttttattgttagattataaaaacgctatcttgaaatcgctttttaaaactcttcgtaagtcaaaaatatgctataataaaagcgttatggaaaatttaaatattacacaaattgctattgatttaggtattaaagcgtcacaaatcgaaaaggttttagaattaacagatgaaggaaatactattccttttattgcccgttatcgtaaagaaatgacaggtaatttggatgaagttcaaatcaaatcaattattgaccttgataagagtatgacagctctttcagatcgtaaaactacggtcttagccaaaattgaagaacaaggaaagttgactcaagaactcaaaaaggctattgaagaagcaactaaactagcagatgttgaggaactctacctaccttataaagaaaaacgtcgtacgaaagctacgattgcacgtgaagcaggtctttttcctttagcacgtcttattttacaaaataaggataaccttgaggaagaagctcaaaactatcttacagatggttttgagacaactacgaaggcactttctggagcagtagatattcttatcgaagctttttctgaggataataaattacgttcatggacatataatgagatctggaactacagctcaatcactgcagttgttaaagatgagtcacttgatgaaaaacaggtcttcaaaatctactatgacttttctgaaaaaataagtaaactccatggctatcaagttttagcattgaatcgtggtgagaaaatgggtgttcttaaggttaattttgagcataaccttgaaaaaatgtttcgcttttttgctgttcgatttaaagaaactagccaatatatagatgaccttattgtacagactgtcaagaaaaaaatcgttccagctatggaacgccgtatccgtacagaactaagtgaaggagcagaagatggtgcaatttcactgttttcagagaatcttcgtaacttattgttagtctcaccgcttaaggggaaaatggtgttaggttttgaccctgcctttcgtacaggagcaaaattagcagtagtagaccaaactggaaaattaatgacaacacaagtgatttatccagttcctccagctaatcaagcaaaaatcgaacaatcaaaaatagagttagcaaaacttatcaaagaattcaatatagaaattattgctatagggaatggaacagcgagtcgtgaatcagaagcatttgttgcagaagttttacaagattttccagacgtatcctatgtgattgttaacgaaagtggtgcctctgtttattcagcctcagaattggcacgtcatgaatttccagacttaacggttgaaaaacgttcggccatctcaattgcaagacgtctgcaagacccattagcagaactagtcaaaattgatccaaaatctattggtgtgggtcaatatcaacatgatgttagccaaaaaaaattagcagaaaatcttgattttgttgttgaaactgtagttaaccaagtaggtgttaatgttaatacagcaagtccagccttgttagctcatgtttcaggtttaaataaaacaatatctgaaaatattgttaaatatcgtgaagagaatgggcaaattaagtcacgtgctgaaattaagaaagtgcccagattaggagcaaaagcttttgagcaagctgctggattcttacgtattcctaatgctaaaaatttcttggataatacaggtgttcaccctgagtcttatgaagctgttaaaaagttgcttgaccaactgactatcaaagaattagatgatcttgctaaagagaagttacaaaaccttgacttaattgcaacagcagaaagtattggggtaggtcaagaaacattaaaagacattatagaagatcttttgaaaccaggtcgtgatttgcgtgatgattttgaagcgcctgttttgagacatgatgttttagatgtcagtgatttaaaagttggacaggaattgcaaggaactgttcgaaacgtcgttgattttggtgcttttgttgatattggtgttcatgaagatggtctaatccaccagtctcgccttattaagcgaaaacgcgataaaaaaactagaaaaatgcctcctttacaacatccaagcaaatatctctctgttggtgatattgtaactgtttgggttgtagaggtagatgcggagcgtagcagaattggacttagtcttatcaagccagacggacttgactaattatgttaagaaggtgtctatagaagattttggatgtcagtttttacatactgcacattggaataatcgcttaagaacaactggaggacgcttctttccaaacgatagacaccttgactttaatcccaaaatttatcgtgagtttggtattgatatttttcgtaagattgtaagacatgagctttgccattatcatctctatatacaaggtaaaggatatcaacatagggataaagcttttaaagagttactagaaaaagtcgatggcttacgatatacccctagagttacggctgttaaagtgaattatcatcattactcttgccaatcttgcggtcaagtataccgacgtaggagacgtgttaatttacgcaagtttgcttgtggttattgtcatggtcgcttgatagagagtttttaaaatcagtcgtaaggcctatttaattttactgtcaaagtagttataattaaaatatagagtagatagaaagaaggataggtatgaaatcaagcttctacaaacaacgaaaaggtaagttggtctgcggtgttgtcgccggtctagctgataagtataactgggatttagctctttcacgggtgttgattgcactgattttgtattttaccaaatttggtcttttgctatatattttattagctgttttcttaccctataaagaagatattattgaaacaagaagacaaggtcccagaagacgtaaagatgctgaacctgttgatgatgacggttggttctggtaattcatataaaggagatttgctagatgaatctccttttttcttagctttatttagaccactttttcaaaatatcttctttttttcagaaaaacgcgttagcgcttacttttagtaaaaagtatgatataatgtgggtgtaaattaatgaaagtgtttagtacctttgctcaactttaaattgtagggtatagcaatagggatattcacttttataagaaggagtaagtatggcagttactgttcaaatgttagttgaccgcttaaagttaaatgtcatctatggtgatgaacatctattatctaagcggattacaacagctgacatttcacgtcctggtctagaaatgacagggtattttgattattatgcaccagagcgtttgcaacttgttggtatgaaagagtggtcatatttaatggctatgacaggacataatcgttatcaagtgttacgtgaaatgttccaaaaagaaacaccagctattgttgtagcacgtgatttagaaattccagaagagatgtatgaggcggctaaagataccggtattgctattcttcaaagtaaggcccctacaagtcgtttatcaggtgaagtttcttggtatttagattcttgcttagctgagaggacaagtgttcatggtgtcttgatggatatctatggtatgggtgttctgattcaaggtgattccggtattggtaagagtgagacaggactagagctagttaagcgaggacatcgtttggtagcagatgatcgtgttgatgtttatgctaaagacgaagagacgctttggggagagcctgctgagatattacgtcatttacttgaaattagaggtgtgggaatcattgatattatgagcctatatggagctagtgcggttaaagattcatcgcaagtgcaattagctatataccttgaaaactttgaaactggaaaagtttttgatagactcgggaatggcaatgaagagatcgaattatctggagttaaggttcctcggatacgtattcctgttaaaacaggccgaaacgtgtcagtagttattgaagcagcggctatgaatcacagagctaaacaaatggggtttgatgctacccagacttttgaggatcgtttaacacatttgattagtcagaacgaggtcaatgatgattaatccagtagcaatacgattaggccccttttctattcgctggtatgctatttgcatagtgtctggtatgttgttagcagtttacttagcaatgaaagaggcccctcgtaagaacattaagtcggatgatattctagatttcattctcatggcttttccactatccattgttggagctcgtatttattatgttatcttcgaatgggcttattactctaagcacccagtagagattatcgccatctggaatggcggtattgctatttacggagggttaattaccggggccattctccttgtgattttttcatatcgtcgcttgattaatcccattgattttctggatattgctgctccaggagtgatgattgcccaagccataggtaggtgggggaattttattaatcaagaagcatacggtagggcagtaaaaaatctgaattacgtaccaaactttataaaaaatcaaatgtatattgatggagcttaccgagtacctacatttttatatgagtctctttggaacttcctaggttttgtcatcatcatgtctattcgtcatcgaccgcgcactttaaaacaaggtgaagtggcatgtttttatttagtttggtatggatgtggacggttcattattgaagggatgaggacagatagcctttatttggcgggtttgcgcgtgtcacaatggttatcagttattttagttattatcggaattgtcatgattatttatcgtcgtcgtgaacaacatatttcatattattaaacagaggaggtattatgatagaaattgctgtattaattattgccattgcgtttgttgttttagttttaggaatacttttcgttctgaaaaaagtatcagaaacgattgaggaaaccaagcaaactattaaagtattaacaagcgatgttaacgtgactctttaccaaactaatgaaattttagccaaagctaatgttttagttgatgatgttaatggtaaagtatctactattgatcctctttttgtagctattgctgacttatcagaatctgtatctgatttaaacctacaggcaagacatattggacaaaaggcaagtagtgcaacctcaagtgttactaaggcaggttcagctttagctattggaaaagcggcttcaaaaatttttcgtaaaaaaggagacaaaaaatgagtaaattatttaaaactttagttatcagtgctgcatcaggtgcagcagcagcttattttttaacaacaaaaaaaggaaaagagctaaggaaaaatgcagaaaaattctatggagaatataaagaaaatccagaagaatatcatcaaatagctaaagataaagcaagtgaatattcaaatttagctgttgatacttttaaagattataaaggtaaatttgaatcaggtgaattgacaacagaggatatcgtctcagccgttaaggaaaaaagcggagaagtagttgactttgctaatgattttgtcaatcaagctaaatcaaaattctcagacgaggatactgctaaaaaagaagataaggctcctgaaacaaaagtagaagatattgtcattgattataaagaaaacacagaagataaagaaaaataaaaaagaagctactataagtagcttcttttttatgagatttttattgtctgagtgaccaaatgaatgaagagactgcagatgtaactgctagacttgccagcatcgctagtaagaaactccagacaggtgttaaacttagtgctagtaataagaaagagattagcacagtggttatactgaagagagcgatacgagcaaaaaagactagctcacgcaacttagcactgtgatcaaattcttgaaatacttgaaattttggttgagcttgctctgttttgctttcgtgagtttgctcttgcttaagtggtgatgacatagctttctcctttgatactagcatatcatatcacaaataatagagtttgtcactagttttttgatactatgagttaaaataaaggttttttctcaaaaaaacaaaaacattgcccatattagtagtagaatactaaaagtattttttactactttccttacttttttaaattggaaaagaaaaaatagatataattttatataatattacaatactatattttttcttatctgatagtgcttaacctctaaagtgatataattttcgaaaagaatatttttatttattcttgtcaagaaatatgcttaaaaatgctgaaagtttgttataatactaattatggaaaaaataattttgacagcgacagctgaatctattgaacaagtaaagcaattgctagcaataggaattgaccgcatctatgtaggggaagaaaattacggtcttcgtttaccacattcattttcagacgatgaattgcgtgaaatcgctaaattagtacatgatgctggtaaagaattgacagtagcttgtaatgcactcatgcatcaagagatgatggataatatcaaaccatttttggagttgatgaaagaaattaatgtggattatttggtagttggtgatgcaggagtattttatatcaacaagcgtgatggttataacttcaaacttatctacgacacttctgtcttcgttacatcaagtcgtcaagttaatttttggggacaacatggagcagtagaaacggttttagcacgtgaaataccttctgaagaactttttaagatgtctgagaatcttgaatttcctgctgagattttagtttatggggcttctgtaattcatcactctaagcgtccgttattgcaaaactattataattttactcatatcactgatgaaaaaacacgtgagcgtggtctttttttagcagaaccaggtgatccagaaagtcactattctatttacgaagataagcatgggactcatatttttattaacaatgatatcaatatgatgactaaagtgactgaactagttgaacatcactttactcactggaaattagatggtatttattgtccaggagataattttgttgctattgctgaaatttttgtcgaaacagctcgtttgattgaaaatggaacattcactcaggatcaggctttcttgtttgatgaacgaattagaaaactgcaccctaaaggacgtggtttagatactggattttatgattttgacccatcaacagtaaaataagatttatttgctacgtgaaagttttctatttcaaagcgtagccaattacactaagaactgcatatcgattggtatgttaattaagatagaaaataattcttttatcttgaaaatagaaggaaatataagatgtctaatgtaaaaaaacgccctgaggttttatcacctgcaggaacactagaaaaattaaaagttgctattgattatggagcagatgctgtatttgttggaggtcaagcgtatggtcttcgaagtagagctggtaacttttctatggaagagttacaagagggaataaactatgctcatgcaagagatgctaaagtttatgtagcggctaatatggttactcatgaaggtaatgagcttggggcaggtccgtggtttcgtgaattacgtgatatgggactagatgcagtcattgtttcagatcctgctcttattgttatttgtgctacagaagcaccaggcttagaaattcatttgtcaactcaagcctcttccacgaactatgaaacttttgaattttggaaagagatggggcttactcgtgtcgtattagcacgtgaggttactatggcagagttggctgaaatcaggaagaggacagatgttgagatagaagcatttgttcatggcgcgatgtgtatttcatactcaggacgatgtgttctatcaaaccatatgagccatcgtgatgctaatcgtggcggttgctctcagtcatgtcgttggaaatatgacctctacgatatgccatttggacaagaacgtcaatcgttaaaaggcgagattccagaacctttctcaatgtcagctgtggatatgtgtatgattgagcatattccagatatgattgaaaatggtgtagatagtttaaaaatagaaggacgtatgaaatccattcattatgtttctacagtaactaattgctataaagctgctgtagatgcctatatggaaagtccagaagcttttgaagctattaaagaagacttgattgatgaactttggaaggttgcacaacgcgaattagcaacaggtttctactaccatacaccaactgaaaatgaacaactctttggagctcgtcgtaaaattcctcaatacaaatttgttggggaagtggtttcatttgacaatgctaaaatggaggctacaattcgtcagcgtaatgttattatggaaggagatcgcgtagaattctatggtcctggcttccgtcactttgaatgttttattgatggtctgcgtgatgctgaaggaaataaaatagaccgtgctccaaatccgatggaattattaaccataacattaccaaatccagtaaaaaaaggggatatgattcgtgcttgtaaagaaggattagtgaacctttatcaaaatgatggtactagcaagactgtaagagcttagatacttttataactattttgtcattttacatggtcaatattactaaaaattgttaaaatagaagaagttcatttaaatagaacaaaaagctataaaaataacgaatagtataagtggaggtataaaatgtcagaatttacatttgaaattgttgagaagttattggtcctatctgaaaatgaaaaaggttggacaaaagagttgaatcgtgtgagcttcaacggagcgccagctaaatttgatttgcgtacatggagtccagatcatacaaaaatgggtaaaggtatcactttatctaatgaagaatttaaagtcattttagatgcttttcgtaaataaataaaaagtggtttcaaaaaccactttttttgtcgagacaaacgagtattcagtaaacatattgattaaaaaaatagaatttttaaactaaaagaattataatggaggtaaaaggaggcctctatgattagacattcatttaaaagtaaggtgttattgttagtctttatcttaacaataatagtgaattatttatccgcaacaggttttttaacagggaacagtcagaagagtctgtctgatcgttatcaaacgctcttgacaccagcaccattagccttttcaatttggtcagtcatctatttattgacctttttagtaatattaagagctatattcagtaagagtcaatcttaccaagataactttgctagcatttttccatactttttgggtcttctattagttaataatatatggactgtattttttacgagtaatttgattggcctatcaacaataataatttttgcttactgtattcttctggttatcattatcaagatactaagtaaaaataaatcaaaattactgcttagaataacatttggaattcatgcaggatggttgctagttgcgtcattggtcaatttagcggtctacttagttaaaattgattttaattacccattaccaaaggtatatatagctatcattgccttgatttttataactgttttaagtctttacctagctagagtattacaaaatgcttacttaatcttatccgttttttgggcttggttgatggtttttaaagcacatttagaaggaaattttcaacacctatattttagtatccaaattttatctttgattgcagcaattatccttggcgtatcgtttttcatcatcggttattataatgtcaaggagaggtacaagcaaaaaaatactagcccttactcacgggttctttgaaagaaatacaaaaagctccatcattatgtactttcctctatcattagatgtatgtctcatgatagaggttcagttcattagtggggcttttttgtattgtattaaagtaaatccatgattaatttcaaattgagtaatgttaaaatgatggcgacaaggtatgctaaataggtattccatttagcattagcatgctctcccataattgatttttgcgacgtgaaataaatcaatggaaagattgaaaatggtaaagctaaggaaagaaaaacttgtgaatagacgattagttgatctaacgtattttcttcgcctccaactagtagggcgataacaaaaattggaagaagagttaataatctagtacaaagccttattaaccattgaggtaatttgaagtgaaggaaaccttccataacgatttgtcctgttaaagtacctgtaatcgttgaattttgaccacttgctagtagggcaactgcaaaaagggtagaaaggaaagaactggctactgcaccagtaatagttttatcagatagggcaagatacatttgagaaaaggcactgatatcattagcatgcccataaaatagactagctcctaagactaatagtagcgaattcacgacaaatgcaagtgatagctgaatgttagaatctaaggtcatgaaacgtacagctttttttattgaagatttattatgataatccacgcgtctagtctgagataaagaagaatgtaaataaagattatgtggcatgactgttgcgccgataatgccaagagcgagggttaaaggactatttttcccttcatgtgatatgttaaaaagctcatggtgtggtaaaaatcctttgaacatagcatctaaatcaggttgtgataaaacaactaaatatgtaaagattatcaaaattgtcaatatgagaacagaaacaaaggcttcaattttttggacgcctaacttcattaagagtaaaagtaagaatacatccaaaatagtaatcatgatagacagtaacaggggccagccaaataataagtgaagagcaatggcagagccaatgacttctgctaaatcagtagcgataagggctaactcaatgataataaatagcaggtaacgaagcggttttgggagtcgagaagctgttgcttgtgctaagtcctgtcgtgtaacaatgccaagcttgccagccatttgttgtaattgcatcgccatcaaagaagatactaaaacaacaaacaatagtaagtaacgataggtagctccaccaataacgctagtaatccagttacctggatccatataaccaactgcaaccaaagctccaggtccaagaaaagctcttaaagtgttccaaaaagagctattgtgaggaacctcaacgctctgattaacttcggataaggatcttttgacggaatgattttgattcatgtaatactatactttctagtaatctcaagccattataacaaatagaaaatagaaaaacaattaaaaattaacgctacttaataatcaattgaggtgctgtttagtatttagagaattattttcttaacagttacatttgaaataacaaaataacagatttctatcgattatttttagttccgtagatttacctaagttatttaagtggagtaaactatatctgtagtgaattttttaagaaatataatccaataatactagcgattcttgtttgattagttcgaaagattgctttatggtatagatatactgtcttgtagagataagaatagatgagctacttaattattattttataataaaaaacacattatttttattgacaaataaaaatgagtttagtaaaataactgtcaaatagaatttcttcggggtcaggtgaaaatcctaaccggcggtatagtccgcgagctttcgagcatgaactggtgtgattccagtaccgacagtaaagtctggatgagagaagaattcagtgattgtctgctacttgcagtttatttgtgctggattaatgagagactccctatagttttctatagggagtctttagtttttttgtgctacctaaaatataatgctaattagtataatcaacgacttctcatccctccccttagttttctattttagaagctaagggtttttattttagaaggaaaaaggaaatgatgaaaaaagaagactacatggcattagccttgaaagaggctgagaaaggtatggggttcgttgctcccaacccattagtaggtgctgttattgttaaagatgatcgtataatttccaaaggttatcataaacgatttggagatttacatgcggaaagacaggctattaaaaatgctgatgaggatatctctggaagtactctgtacgtgactttagaaccatgctgtcatgttggtaagcaaccaccttgtactgaagctcttattaaatctggtatcaaaaaagtagtagttggaagtttagatccaaatcctttagtttcaggaaaagggattgccttgttgagaaaagaaggtttaaatgttgaagttggtatcttaagagaagaatgcgatgctctgaatgaaagatttatttttcacatgacctataagcagccttttgtttatttgaaatatgctatgactttagatgggaagatagctacaaagacgggcgattctaagtggatatcaaatgagcactcaagacaatctgttcagaaattgaggcaaaaatgtagtgctattatggtcggtatcaatactgtattagctgataatccacgtttaacttgccgtattcctaaaggtgaagcgcttgtgaggatcgtatgtgatagtcagttgaagatacctttagactcttacctagttaagagcgctaaaacaataccaacatggattgcaacatgttcagataatcttgctcagcaacaaacattaaaagaaatgggttgccgtttgattaaggtcccaagaaaagatggaaagctggatttgaaagtattaatgactattttaggacaagaagggattgatagccttcttattgaaggaggaagtagtttacatttttcagctttaaaagctggtattgttaacagactaattgtttttattgcacccaaaataataggaggtctgaaagcaaaaacagctatttctggagaaggtttggattggcttaaccaagctttcagagtaaaagatattgaacttagtcgtatggattctgacgttgttattgaaggaaaggtagaacattatgtttacaggaattattgaggaaatgggtcaagtcagtcgtattcggaatggcataaagtcccaacaattaagtattgatgctcccaaactagtccctttattaagaaaaggggatagcgtagctgttaatggtgtttgtttgacggttcttgacaaaagtgaaacagcttttatagcagacgtcatgccagaaagtatgatgcgaacaagcttagctgctttacgacttcattctaaagttaacttagaattagcactcagaagtgactcaaggttaggggggcattttgttcttggacatgtggatggggttggaaaaatagaaaaaatccaaaaagatgatattgctgtcagattttcaattgatgctccacctagtattatgtcttatattatagagaaaggttcggtggctctagatgggattagcttaacagtggtatcatttacagagcattcttttgaagtttcggtcattccccacacgatggctcaaactaatctatccttaaaaaaggttggggatttattaaatatcgaagtggatgttttaggcaaatatgctgagaaatttttagcacccactaatagaactaatcacacttcatcggtaatggattggtcttttttatcagaaaatggctactaagagagaggagaaagctaatggcctttagtccaataaaaaaacttttacaagacatcaaatcagggaaaatggtagtgttgatggatgacgaaaatagagagaatgaaggagaccttatttgtgcggctgaaatggtgacaaaagagtcgattaattttatggctaaatttgggaaaggattaatttgcttacctctgtctaattactatgctgaaaagttagaattagctcaaatggctagccataatactgataatcatgaaacagcttttaccatatctattgatcatctatcaactagtactgggatttctgcggaagatagagctttgacagctaagatggttgctaacgacagtagcaaagctaaagactttagacgtcctgggcacttatttcccttgttagccaaggaaggaggtgttttagctagaaatggacatactgaagcaaccgttgatctatgtcgtttagctggattaaaggaatgtggactttgttgtgaaataatggctgaagatggtagtatgatgagaaaggatgagttattagcatttgctcaaaagcacgatttagctatcgctaccataaaacaattgcaagactatagacgtcaagaagagggaggggtggttagagaaattgagattcagctaccaacgcaattcggtcattttacggcttatggatatagcgaagttgtggcaaataaggaacatgttgcccttgttaaaggggatattagtagtggtgaagatgttttatgtcgtttacactcagaatgtttgacaggtgatgtctttcattccttgagatgtgattgtggggaacaactggctaatgccctccaacaaatagaggctgaaggtcgtggagtccttctttatatgagacaggaaggtcgaggaattggtttgattaataagttaaaagcttatcatttgcaagaagaaggcttagatactttagaagctaatttggctttaggttttgaaggagatgagagagactatggagttagtgctcaacttttaaaagatttaggtataaattctataaacttactaaccaataatccagataaaatccaacaacttgaagcagaaggaatttgcgtcaaaaacagagtgccattacaggtggcagtaacagcttatgaccttaattatttaaaaactaaaaaagaaaaaatgggacatcttttagattaaaggaggaagaaaaaatgacaattattgaaggacaattagtggcaaacgaaatgaaaataggaatcgtagtctcacgtttcaatgaattgattacatctaaattattatcaggagcagtagatggactgctgagacatggtgtttcagaagaagatatagatattgtatgggtacctggtgcttttgaaatcccctatatggctagaaaaatggcattatataaagattatgatgctattatctgtcttggggtagtcattaaaggcagcactgatcattatgattatgtttgtaatgaggtgacaaaaggtattggtcatttaaatagccagtcagatatccctcatatctttggtgttctaacaacggataacatcgaacaagctattgagagggcaggaacaaaagcaggaaataaaggttatgattgtgctctttcggctattgaaatggtgaaccttgataaaaaattgcgtgagcgataaatcagaaacctaacaaagttcagtagaggtaatattaaaacccaccttaaataaggatgggttttaatatattcttatttcattgtagggaaaagtaggacgtctcggatagttgttgtatcagttaacagcatacagagacggtcgataccaatacctagtccaccagtaggtggcataccatattcaagtgcttcaacataatcgtaatcaactccagttgcttcatcatcgccaagttctttagcagatgcttgtgcttcaaagcgagatagctgatcaattgggtcatttaattctgtaaaagcattagcgtattctttagtcatgataaagagttcgaaacggtctgtaaaacgagggtctgtatcatttttcttagcaagtggagacacttcaactggatgaccaaagacaaaagttggttgaattaaagtgtcttcaacaaattcttcgaagaaggcattaatgatgtgaccaactgttgtgaaatgtttttcaagcggaacatttttttcttgtgccaaagcttgtgcttcttcaagagtcatttctttccagaagtcaataccagtgatttctttaaccgcatcaaccatatgaacacgtttgaatggttcattaattttaatttctgtgccttgataattaattggtccatcaccttttacagtttttgtaacatgctggataataccttctgtcaagtccataatatcctggtagtcagcataggcttggtaggcttcaatagatgtgaactctggattgtgggttgcatccatcccttcattacggaaaatacgtccgatttcataaacacgctccataccacctacaataagacgttttagatgcaattcagttgcgatacgaagaaccatgtcaatgtcttgtgcattgtgatgtgtgataaatgggcgagcagaagcaccaccagcttcattatgaagaacaggtgtttcaacctctaagaaaccattgctatccataaagcgacgaatttctgaaatgatttttgagcgtgttacaaaacggtcaaagctgtcacgatttgagattaaatcaagatgacgtttacgatagattgtttcaatatcagttaggccgtggaatttttcaggaagtggacggagtgcttttgaaaggtgagtaatatgagtagccttgatagaaagttctcccatatctgtacgcattacttgcccttcaacaccaaggaagtcacctaaatcagcttttttaaagatttcgtagttttcttcgccaacagaatctttacggacataaatttgaatttgaccttcgcgatcttggatatgcgcaaagccaactttccccttaccgcgcttagtcattaaacgaccagcgattgtagcagtttcttcaatgtcgtgcaagtcttcttttgatttgtcagcgtatttttcatttaattgaccagatgttgctgtacgttcaaatcgtttaccaaaaggatcaatgccttgttcagtcaaagcagccattttttcacgacgaacaatctgttggtcatttaattcttcaatatgttggttagacataatttcctccaagttagtattcatcctattgtaccacaaaaacactgataattcataatttattttatgagtttctggtgttattctcatttttaatagacttttcaccatttgaaaataagggtagaaaaaggtataattaacaattgaaaattcagaaagaaaaggataatcatgattacttcaattgtttttgatgttgatgatacgatttacgatcaacaagcaccttaccgtattgctgtggagaaatgctttcctgattttgatatgagcgctattaaccaagcttatattcgctttcgtcattattcagatattggctttccacgagtaatggctggtgaatggacaacagaatattttcgtttctggcgatgcaaagaaacgcttttagagtttggttatcgtgaaattgacgaagctactggtatttattttcaagaaatatacgaacatgaacttgaaaatattacaatgcttgatgagatgcgtatgacacttgactttttgaaatcaaaaaatgtaccaatgggaattattacaaatggtcctacggaacatcaattgaaaaaagttaaaaaattgggactttatgactatgttgatccaaaacgtgttatagttagtcaagcaactggttttcaaaagcctgaaaaggagatttttaatttagcagcagagcaatttgatatgaacccttcaactacactttatgtgggtgattcatatgataatgatattatgggtgcatttaatggtggttggcattctatgtggttcaaccatagaggacgttctttaaaaccgggaattaaaccagtttatgatgttgctattgataactttgagcaattattcggtgctgttaaagtgttgtttgacttacctgataataaatttatttttgatatcaacgataaaagtaatccagtccttgaaatgggacttaataatggtttaatgatggcagcagagcgtctgcttgagagtaatatgagcgttgacaaagttgttattttactgcgcctaactgcaaaacaagaaaaagtattacgcatgaagtatgctagataattaaataatccactagatgaatctagtggattattttagtgtgtcattttgacctcttgccttaaataagatttatcgttccaagtcagacagttgaagtctttaaaatcatgagtttctatgattgtgaggctggcattatcaagtttatctttgtagtgtaaactaccatattgataacccagtaaggaacgaatagacgcagttaggtttgctccatgtcctacaataaggaccttgtcgtaattttttgaagctagagaacgtaagaaactctctacacgatgcgttgtctgataaagagattctgcaccgaacatgtcatgtttaaattgtaagggattttgataaaatgcggtcatttgacgaggatagatagcttgcatagttgcaattttacaaccttctaaagttcccaatgcccattcacgaagttgaggagtatagtggatttcttttgggcatgaattagcatcattgaggatattaacagtatctctagcacgacctaagtcgctagaataaacagcatcaaaatgaatagatgataggtattgtccaagttcttctaattcttcaatagcttcttcaaggagaggtgagtctccgttagcaccttggaaacgcccctctaaattccattgtgtttttccgtgtctaacaagataaaatttcatatttttctccaatcctaattattattcctttatatcggcaaatttagcatttacgaaatctgcaagaacctcactattaatacgaatagaacgtccaatttctcctgcagagacaatgagttcttgtttttctaaagcgatagtatcgataaaaatagggtaattatgtttttggcgaattccaattggattatttgctccgtgaatataaccggttattttctggagatctttttgaggtatcatttgtacctttttgtttcctgaaattttagctaactttttttcggataaatgctcggtgagaggtaagatacctattatgggaccggttttatcaccgattagcgctaatgtcttaaagatatcttgtttttgaataccgttgggtaaatctccctgtaaagcatccaattgtagactatcatgttcgatttttgctttatctaaaatttgatcaactaaagtttttttgattttattctttttactcataatgacccttaactaataagtttgtttcatatttattataacatttaaagatgattatagtaaatttctactgactcttagaaataagcttgaataccatttcagggaataatgataataaatatcgcaacagtactatttggaatgttaaattagaagttttataaatagctaaatatgaagtgtcctgatgtaatgacttgaaatcataccgtggtcaggtattaaacgattactttgacaaggcatataaaaatttctatactaaatttacaaaatgaaggagagggaactatggaaatactgattgcaggtggtagtggttttttaggaaagcagataataaaagcagcgcttacaaaagggcataaagtggcttacttatcaagacatgaaggtaaaggtgatatatttaaggatcctagattaacctacattaggggagatattacagaagctgataagattcatttagaagacagaacttttgatatattaattgactgtattggagcgattaagcccaatcaactagatgagcttaacgttaaagcaacccaaaaagcagtagcactctgtcacaaaaatcaaataccaaagttagtttatatttcagccaacagcggctattcagcttacattaaaagtaaaaggaaggcagagcagataatcaaagcaagcggtctggattatctttttgtaagaccaggtttgatgtatggtgaagagcgacctctctcgattttccaagccaagtgtataaagttatttagtcatttgcctttcttaggtattgttgtacaaaaggtctttccaactaaggttgtgatagtggcagaagcaatcgttactacgcttaggaaaaaaccaacccaaaaaatcctttctattgaagaattaaataataaatagtttatcaaaaaagctactgttaacagtagcttttactcttttacttttccaaaaagtttctcataagttttcttcttgtctttattaactgcaatttgatttaaatcaagcggttgattgaatcctggtagataaccttgagaggtgtattggtgtaaatcgtatttaagttcagtttgcggagccgcttcatagtatccagaatcgctaccataagttggaatccaaacagcgtcaaatccttttacagagatgccttgctcagtcataaagtaagtaccaatgtagataccaacatttttagcaccaagtctttttaattcttttcggaatgcttggacacctttattcatgttagacattgtctcctcttctacgtcaatccaataaaaagttggtttgtaaggagctgcattcttataaaatatctgagcctcttctttcatttctttaacacttgaaccaagtgcataactgtagacagctactgggatatttcgcttttgaaattctttgatatgggtcttaaacgatttatcgattccagttgtataagcagcgttattagtcttagatatctttgatccaccaaagacacgaataacaacacctgaaatattttttgaaagcgtatcgtaatcaatctccttaggaagttgccaaccagagacatcgataatcggtttaagaacaaactctttatctttcgatgatgttgatttttgcggtacttttgaagcttttacggatggaattgtctttttagcttcaactaattcttttttcaaagtatttgtcgaatgtaaatgaccaataattaataaaagtccaaataaactgaaaaaaaccgcaacaacaataggtttaattcttcttctcattattgatattgtaacttaaaaggtttaaaaaatcaaagtttacaggcttatttacgttcttttaaaaaagaggtcgtttatgtaacattagaaatgaaattgtaataaaaaagacttttaagcggtagtcatagttttgaggtataattaaagacatgataaagaattcaactttaactaaattgactagagtcgctatattatctgctttgtgtgttgtgttgagatatgcttttgcgcctctgcctaacattcagccaattactgccatttttttgattacagttgtcttattcgatttaaaagaaggtgtagctactgtaactataacaatgctagtttcttcttttttaatgggctttgggccatgggtctttttgcaaatcatttccttcactttaattttatgcttgtggaaatttctgatatatccgctgacaaaagctgtatgttttggtaaaataacggaggtagtacttcaaactttctttgcaggagggttaggggttgtttatggcgtcattattgatacctgttttgcttggttatatcatatgccttggtggacttatgtattagcaggacttagttttaatatggcacacgctttatcaacttgtttattttatcctcttttgttaccgattttaaggagatttaggaatgaaaaaatacattaaattattcttgctaacagtattcgctacaactttagtagcttgcgggcaaccatctacatcgaataagacaacaactagctcaacgttagaagttggtaaggttgaattggtggttaaagaagatacgaacgtgttaagtgaaaaggttgtttaccataaaggtgatactgttttggatgtgcttaaagctaactataaagttaaagaaaaagatggtttcattacttcaattgatggcatcagccaagatgaaaccaaagggctttattggatgttcaaggtcaataataaattagctcctaaggcagcaaaccaaattaaagttaaaaagaatgacaaaattgaattttatcaggaagtttacaaaaaataagataaaaacaagttggagatatctccaacttgtttttatgtttttgaaaggctgtagtttagccttgctcaataagattactgtaattaataatttggtctacagtgttagataagaaattaatagtatcgcgcagaggcttatcagtagaaatatcagcactgattaatagagctgtttctaaaggggtacggctcccaccagatttcaagaatgctaaccactcttttgctccgtttggattatttttgagattgagatagccggctgtcgagattactaatccagcagagtaagtatagctatagagccccatgtagtaatgagcttgtctcatccatgtcaaagcggcatcgtcatctatttcaatagcatctccccagaattgtgttaatacttccttcataatagcatttaattgttctgctccaaaagttcctccctcctcaattagagtgtaaactttacgttggaaagcagcttcaagtaagtgagtaatgaaattgtggaagtaagtatcagttaagcgatgtgcaagagcaaagcgtttttgacgtgctgtatcaaattggttttctaagtagtcactaagtaaaagttcgttaaaagtagatggagcttcaacatagtaagtggacatgtgagtattgaaaaaactttggtgattatctgagaagataaattgaccagaatgtccaatctcatgaataagtgtgtagacatcgctcatacgccccgtccagctcatgagtacatagggatgaactttgtaaggatccgcagcatatcctccagaatctttattagcgttagctgcaaaatcaacccaacgctctttttgatagcgctcaacctcttgagaatattcttttcctaaaggagcaactgatttcattactaagtcataagcatcattgatacttacttcgggattaagttcgttatcaatgtctaatttccaatctgcaaaagtcatcttttcaataccattaacatcggcgatatgtttgaggaatcgttgagctactggaccaaattcatccatgataagatcaatttgtctgtcaaacattgaacggtcaacttcttgttcggaaagaagataatcaaaaacactatcgtaaccacgcatatcagcaattaacttttcagatttgacttttgcaagataagccgcagctgcagcattttggtgcttacgtagacctttcgagaatgaacggaaggatttttcacgtatctctgcattttcgtgattttgaaagtaattttcataagttacaaaactatttttgtaggtttttccgtcaacttcaaaatcttccatatcaaaatcgccagcacgcattttagtataaatatcatatggtgtatttaggacttcatttaagtttgtcaaagctttttcgacttctggacttaataagtgttgcttttgaattttagcttggcgaatagttgctttgaaatgagggttattttctaaagaatctaaaatctttatatctgcatttgctagggcagtattaaagaaagaaagtagtacattagctttagttgcgaagtctgatcctgcttgagaaatttgtgcaaactcttcgttgctaaagtcagtagtttgaggcataaaagcatacgtatcaatgtgactcatctggatataaatatgctcgatttccataagggcactagtaaaatcctcaacacaattaagttttccctcgtaattttttttgaaaaccttgatatcctcaagagctttttcaatagccagtaaaaaatcttgacgatctttgtagagagcagtcagatcccaaagttcattttcagggaattcagagcgttttttaagtttcatgcgatactcctttaataatagttgttaattaacaattaatcagttaatctcaattatcctcagtatatcaaaaaagtcgaacaagaaaaactgattactgtcataaataagtaaaaatctgaaaattctatctaaaaatcctagaatggtttactttttactttaaaatggtatcatagtagtgagatttaagagaggaagtgatggtttgtcccacccgaaattagaaagtagtagcaataaagaaatcattaccgaagaggtcggtttactgaagcagcttttggatgaagcaacgcaaaaattgattggtagtgaatcatttgacaagattgaaaaaatagtttcattatcattaactgacgattatactggtctgaaggaaactatttcggctttaagcaacgaggagatggttattgtttctcgttacttctctattttgccgctcttaattaatatttcagaagacgttgatttagcatatgaaattaattataaaaataatcttaaccaagattacctaggaaagttatcaacgactattgatgttgtagctggccatgaaaatgctaaagatattcttgaacacgtcaatgttgtgcctgtgctaacagctcatcctactcaggtgcagcgtaaaacggtgctcgaattaacgtctaagattcatgatttattacgtaaatacagagatgtcaaggcaggaatcgtgaatcaagaaaaatggtatgctgacttgcgtcgttacatcggcattatcatgcaaacagacactattcgcgagaaaaaattgaaagtcaaaaatgagataaccaatgtaatggaatattacaaccgttctcttattaaagcagttaccaaattaacagcagaatataaggcactggcagctaaaaaaggtattcacttggagaatcctaagcctctgactatggggatgtggattggtggtgatagagatggcaatccctttgtaactgctgagacactaagattatcagctatggtacaaagtgaagtgattattaaccattatattgagcagctaaatgaactttatcgtaatatgtcactttcaataaatctaactgaagtctctcccgaacttgttacattggcaaaccagtcacaagataattcggtatatagggaaaatgaaccttaccgtaaagctttcaattttatccaagataaactggtacaaaccctactaaatttaaaagttggttcttccccaaaagagaaatttgttagtcgccaagaatcttctgatattgtaggaaggtatataaaatcacatatcgctcaagtagcttctgacatacagacagaagaactaccagcatacgctactgctgaggagtttaaacaagatttgttacttgtgaagcaatctttagttcaatatggacaagattctcttgttgatggcgaattagcttgtcttattcaagcagtagatatctttggattttatttagctactattgatatgcgtcaagattctagtattaatgaagcttgtgtagcagaattattgaagtctgccaatattgtagatgattacagttctctttcagaagaagaaaaatgtcaacttctcttaaaagaattaacagaagatcctagaacattatcttctacgcatgctcctaaatccgagttacttcaaaaagaattggctattttccaaacagcacgtgagttaaaagatcaattgggtgaagacattataaaccagcatatcatttctcacacagagagcgtttcggatatgtttgagttagctatcatgttaaaagaagttggactaattgatgccaatcaagctcgtattcagattgtaccgttatttgaaaccatcgaagatttggataattcacgtgatattatgacccagtatctacattatgaattagttaaaaaatggattgctactaacaacaattatcaagaaataatgctaggttattcagatagtaataaagatggtggctatttatcatctggttggactctatataaagctcaaaatgagctaacaaaaataggtgaagaaaacggtattaaaatcacatttttccacggtcgtggtggaactgttggtcgtggtggtggtccatcttatgaagctatcacatcacaaccttttggttcaatcaaagatcgaattcgcctaacagagcaaggtgaaatcattgagaataaatatggtaatcaagatgcagcctattataaccttgaaatgcttatttcagcttccatagaccgcatggtaacacgtatgattactaaccctaatgaaattgataatttccgtgagacaatggatggtattgtgtctgaaagtaatgccgtttatagaaatttagtttttgataatccttatttctatgactatttctttgaagcaagtccaattaaagaggtatcaagtttaaatattggttctcggccagcagcacgtaaaacaattacagaaatttcaggtttacgtgcaattccatgggtattttcatggtcacaaaatcgtattatgtttccaggatggtatggtgttggatcagccttcaagcactttattgaacaagatgaggcaaacttagcaaaattacaaaccatgtatcaaaaatggccattctttaattctcttttatctaatgtagatatggttttatcaaaatcaaatatgaatattgcgcttcagtatgctcagttagctggaagtaaagaagttcgagatgtttttaatatcatccttaatgaatggcagttaactaaagatatgattttagctattgaacagcatgataatttattagaagaaaacccaatgttacatgcaagtttagattatcgtttgccatatttcaatgttttgaattatgttcaaattgaattgattaaacgtcttcgtagtaaccaactagatgaagactatgagaagttgattcatattactattaatggtattgcaacaggtttacgaaattcaggttaatattgatagagggaggatcattgctattctcacgccaaacgcatgaagaaacttttgttttcagaaaactagattcataatgacaaaatcaatcaaagtagtacactatagatgaggtgactacgatgattgattttattatttctattgatgattgcgcagttgaattggatagtcgtcaatcttggaaaattcgctaccccttatcaaccattctatttcttgtctttgtttgtcagttagctggcattgaaacctggaaggagatggaagattttattgaaatgaatgaaccattgtttgcgacctacgttgatttgagtgaaggttgtccgtctcatgataccttagagcgtgtgattagtcttgttaattcagaccgtttaaaagagcttaaagttcaatttgagcaatcattgacaagcttagatgccgttcatcaactgatttcagtggacggtaaaacgattcgaggcaatcgaggtaaaaatcagaagcctgttcatattgtaacggcttatgatgggggtcatcatcttagtttgggacaggtagcggttgaggagaaaagtaatgaaattgttgccattcctcagttattgcggacaattgatatccgtaaaagcattgtaacgatagacgcaatgggcacgcagacggctatcgttgatacgattataaaaggtaaagcagactattgcttagccgtcaaaggaaatcaagaaacactttatgatgatattgctctttattttagtgatgtcaacttattggaagaactccaagaaaatgcgcagtattatcagactgttgaaaaatctaggggacagattgaagttagagaatactgggtgtcttccgatatcaaatggttgtgtcaaaatcatcccaaatggcataagttacgtggtattgggatgactcgtaacacgattgataaggatggtcagctgagtcaagagaatcgttattttatctttagctttaagccggatgtcctcacatttgccaattgtgtacgaggtcattggcagatagagagtatgcactggttattggacgttgtttatcatgaagatcatcatcagacattggataaaagagccgcatttaacctaaatcttatccgaaaaatgtgcttatattttctcaaagtgatggtatttcctaaaaaagacctcagttatcgtcgcaaacaacggtatatttctgtccatttggaagattatttagtccaattatttggagaaagaggctaagcagatcattgatttaaaaaggaatcttttcaaaattgatgtccgggcacaaaaggatgaagagaaagttttcatgcgtacggcgtgttgctattctcccttttactttacttcgaaagatgatataatgcataatggtaattttttgatatattaaaggaaataatacaatatgaaaattgataaaaggcatcttctgaattattccatcctcattccctatttgatattgtctattctaggcttaattgtaatttattcgacaactagtgcaactctaattcagcttggagctaacccttttcgttcagtaatcaaccagggtgtcttttgggcagtcagtttggttgcaattatctttatctataaactgaaactaaattttttgaaaaattctaaagtgttgactatggcagtattggtagaagtatttttactactaatagcgcgcttttttacacaagaagttaatggagcacatggttggattgttattggtcctattagttttcaacctgctgaatatttaaaagttatcattgtatggtatttagcgtttacttttgctcgaaggcaaaaaaagatagaaatatatgattatcaagctttgacaaaagggagatggcttccgagatcactaagcgacctaaaagattggcgattttattctttatttatgattggtttggtaattgcacaacctgatttaggaaatggttcgataattgttctaacggtcattattatgtactgtattagtggtattggttatcgatggttttcagctttacttggtctaatcgtcgtggggtcaactttatttatcggaactattgcagttgttggagttgagacaatggctaaagtccctgtctttggttatgtagctaagcgatttaatgctttttttgacccatttaaagatttaacagattcaggacaccagttggctaattcgtattatgcaatgagcaacggtggctggtttggtcgaggacttgggaattctattgaaaaattagggtacttaccagaagcaacaacagactttgtcttttcaattgttattgaggaattaggagttattggtgcagggtttattttagctttggttttcttcttaattttacgtattatgcacgtaggtataaaggctaaagatcctttcaactcaatgatcgctcttggtattggagcaatgctattgatgcaagtttttgttaacattggtggtatttctgggttaatcccctcaactggagtgacatttcctttcttatcccaaggagggaacagcctcttggtactttctgtagcgatcggattcgtgcttaatattgatgctaacgagaaaaaggaactcataatgaaagaagcagaagagcaatataagccacaagaaaaaaatgaaaaaataatcaaccttgatgcctttaaataatcatccaaacaaaaatcgagatttttatctcgatttttgtattttttgaaatttaaactctaattaatagagagaagatatttgaagaaaagaagtgtctattaatattctaatactataaattaggatgtatttaacaatatgattatatgataactactaaaaaatacatataagagataacaaatgcctcaatcaatcttacccgaattttaaggaaataaagaaataagcaaaaaagcataaaatacttgcttttttagaggattttgttaaaatagataagtaaagttagactgtattgcctaccgtctatctataaaatatattttattggaggcttttcctaaaatggcaaaagaaaaatacgatcgtagtaaaccacacgttaacattggtacaatcggacacgttgaccacggtaaaactactttaacagcagctatcacaactgtattggcacgtcgcttgcctacttcagttaaccaaccaaaagattacgcttctatcgatgctgctccagaagagcgcgaacgcggaatcacaatcaacactgcacacgttgagtacgaaactgaaaaacgtcactatgcccacatcgacgctccaggacacgcggactacgttaaaaacatgatcactggtgctgctcaaatggacggagctatccttgtagttgcttcaactgatggaccaatgccacaaactcgtgagcacatccttctttcacgtcaagttggtgttaaacaccttatcgtattcatgaacaaagttgaccttgttgatgatgaagaattgcttgaattggttgaaatggaaattcgtgaccttctttcagaatacgacttcccaggtgatgaccttccagttatccaaggttcagctcttaaagcacttgaaggcgacgaaaaatacgaagacatcatcatggaattgatgagcactgttgatgagtacattccagaaccagaacgtgatactgacaaacctttacttcttccagttgaagatgtattctcaatcactggacgtggtacagttgcttcaggacgtatcgaccgtggtactgttcgtgtcaacgacgaagttgaaatcgttggtattaaagaagatatccaaaaagcagttgttactggtgttgaaatgttccgtaaacaacttgacgaaggtcttgcaggggacaacgttggtgttcttcttcgtggtgttcaacgtgatgaaatcgaacgtggtcaagttcttgctaaaccaggttcaatcaacccacacactagatttaaaggtgaagtttacatcctttctaaagaagaaggtggacgtcatactccattcttcaacaactaccgtccacaattctacttccgtacaactgacgtaacaggttcaatcgaacttccagcaggaacagaaatggttatgcctggtgataacgttactatcgaagttgaattgattcacccaatcgccgtagaacaaggtactactttctcaatccgtgaaggtggacgtactgttggttcaggtatcgtttcagaaatcgaagcttaatttaacttaattaagttcccaaacggcagttagagtcagacagctcaaattgtgaagagtcctcagggactcttttttagtatctataattaaagcgttttactagactcgtgaaacttttaattaactataatttatggtatgatagattagtaaataaaaaaagaagaggtatgtgtaatgtcacgtaaaccatttatcgctggtaactggaaaatgaataaaaatccagaagaagcaaaagcattcatcgaagcagtagcttctaaattaccatcatcagaacttgttgaagcagggattgctgctccagcgcttactttatcaacagttcttgaagcagctaaaggttcagaattgaaaatcgctgctcaaaatagctattttgagaattcaggtgcattcactggtgaaaacagccctaaagtattggctgaaatgggtacagactacgttgttatcggtcactcagaacgtcgtgattatttccatgaaactgaccaagatatcaacaaaaaagcaaaagctatctttgctaatggtttgactccaatcatttgttgcggtgagtctcttgaaacttacgaagctggtaaagcggttgaattcgtaggtgctcaagtttcagcagctcttgcaggtttgtcagaagagcaagtatcatcacttgttatcgcttacgaaccaatctgggctattggtactggtaaatcagcaactcaagacgacgcacaaaacatgtgtaaagcagttcgtgacgttgttgcagcagacttcggtcaagcagttgctgacaaagttcgcgttcaatacggtggttcagttaaacctgaaaacgttgcagaatatatggcttgcccagacgttgacggtgcccttgtaggtggagcttcacttgaagcagaaagcttccttgccttattagattttgttaaataaatcacatgatatctaaaggcatagcactctaggtgatatgccttttcttatagatagttaataataagctatttttgattattgaactagtaatcagactagatttttatggctattttttgtagaatagttaaagtaaatattggtatagccaaaattaaaggagaaattttctaatggtaaaattagtattcgcacgccacggtgaatctgagtggaataaagctaaccttttcactggatgggctgacgtagatctttcagaaaaaggtacacaacaagctattgatgctgggaaattaattcaagcagcaggtattgagttcgaccttgcttttacatcagttcttaaacgtgccatcaaaacaactaaccttgcccttgaagcagctgatcaactttgggtaccagttgaaaaatcatggcgcttgaacgaacgtcattacggtggattgacaggaaaaaataaagcagaagcagctgaacaatttggtgatgagcaagttcatatttggcgtcgttcatatgatgtattgcctccagatatggctaaagatgatgaacattcagcacatactgatcgtcgctatgcttcactagatgattctgttattccagatgcagaaaacctaaaagttactttagagcgtgctcttcctttctgggaagataaaattgctcctgctcttaaagatggtaaaaatgtgtttgttggtgcacacggtaactcaatccgtgctcttgtaaaacatatcaaacaattgtcagatgatgaaatcatggacgttgaaattcctaacttcccaccacttgttttcgaatttgatgaaaaattaaaccttgtttcagaatattacttaggtaaataatctaatctttatataaaaaattcaggccaagttggcttgaattttttattatttataacattttgagtgtctgtaaaaaaccatttttatgatacaatagtagtcagagtttttatagcaaggagttaatgttgaatcgtaaaaaaaggtatcgtctcactgtaaaaaagcaaaatgctagcatacctagacgattaaatcttctattttttattattgttttattatttactgttctaattcttcgtttagagcaaatgcagattgggcaacaatcattttacatgaaaaaactgacagctcttacgagttatacagtgaaagaatcaaaagcgagaggtcagatttttgatgctaagggagttgtcttagttgaaaatgatgaacgtcctactgtggcgttttctagaggaaacaatatttcatctcagtctatcaaagagttagcgaataaattatcacattacattaccttaaccgaagttgcttcaagcgatagagcaaagagagattattatttagcagataaagccaactacaaaaaagttgttgaaagtttaccagattctaaacgttacgataaatttggtaaccatctagccgaatcaaccgtatatgcaaatgcagttgctgcagttccagtgagcgctattaactattctgaagatgagttaaaagtggttgccttatttaaccaaatgaatgcgacaccaacgtttggttcagtgaaattaagtacaggcgaattaagtgatgatcaaatcaagaaactggatgctgataagaaggaactgttaggaatttctgtaacaagtaattggcatcgtcgtaaaaaaggaacttctttatcggatatattaggtactatttctacagaaaaggcaggtttaccaagagaagaagttaaaaaatatttgaaaaaaggctattcactgaatgaccgagtgggaacttcttaccttgaaaaacaatatgaagatgacttacaaggaatcagacaaattcgcaaagtagttgttaataaaaaaggtaaagttgtttcagataatattacgcaagaaggtaagtcaggaagaaatcttaaattaacgattgatcttaattaccaaaacaaagtagaaagtatcttgaaacaatactatggcagtgaattatctagtggacgcgctagtttttccgaagggatgtatgcagttgctatagaaccttcaactggtaaagtgttagcaatggctggtctgaaaaatgatcatgggaatttagttgatgacagcctaggcactattgctaagaatttcacgccaggatctgttgtgaaaggtgcgacgctatcatcaggatgggaaaataaagttcttagaggaaatgaagtgctttatgaccaagaaattgctaatatacggtcatggtttacacgaggtttgactccaatatctgcggcacaagcgctagagtattcatctaatacttatatggttcaagtagcacttcgtttaatgggacaagactataatacaggagatgctttaactgatcgaggctatcaagaagcaatggctaaactaaggaaaacttacggcgaatatggtttaggggtttctacaggattagatttacctgaatcagaaggttatgtacctggaaaatacagcttaggaacaactctaatggaatcgttcggtcagtatgatgcctatacaccaatgcaacttggtcagtatatctcaactattgcgaataatgggaatcgtttagcacctcacgtggtttcagatatctatgaagggaatgattctaataagttcgctcaattggttcgttcaatcactcctaaaacactaaataagatagctatctcagatcaagagttagccattattcaagaaggtttttataacgttgtcaatagtggaagtggctatgcaactggtacgtcaatgagggggaatgtgacaaccattagtggtaaaactggtaccgctgaaacatttgctaaaaatgtaaatggacaaacagtttctacctacaacttaaacgctattgcctacgatactaatcgtaaaatagcagtagcggtaatgtatccgcatgttacaactgatacaacaaaatcccatcaattagttgcacgagatatgattgatcaatatatttcacagttcacaggacaataagagaggacatttgaatgctttacccaacaccaattgctaaattgattgacagcttttcaaaattaccgggtataggtactaaaacagcaacacgtttagctttttacaccattggtatgagtgatgaagatgttaatgaatttgctaagaatttattagctgctaagcgggaattaacctattgttctgtttgtggtaatttgactgatgatgatccttgcttaatttgtacagataagacgcgtgaccagtctgttatcttggttgttgaagatagtaaagatgtgtcagctatggaaaaaattcaagagtataatggtttgtatcatgtcttacatggcttaatttcacctatgaatggtattagccctgatgacattaatttgaaaagtttaattactcgattgatggatggtcaggtgacagaagttattgttgctaccaatgcgactgctgatggtgaagctacatcaatgtatatttcacgagtcttaaaaccagctggtatcaaagtgacacgattagcgagaggtttagctgttggttcagatatcgaatatgcagatgaagtaaccttgcttcgagcaatcgaaaatcgtacagagttataattgttataaagaaaaggttgggaatctcctaactttttcttttacaatactaactttaagtggattgatttttgaaagttaggttaaaatatggtattattaaaaggtcaatcttagattagatagaaaagagaagaaatatgtcaaaagaaacattgatcttgctttacggtggtcgctctgcggaacgtgaagtatctgtactgtctgcagaaagcgtcatgcgtgctattaattatgataaattttttgttaaaacttattttatcacgcaagtaggtcaatttattaaaacacaagaatttgatgaaatgccatcttcagatgaaaagttaatgacaaaccaaactgttgatttagacaaaatggttcgtccaagtgatatctatgatgataatgcaattgttttccccgttttacatggaccaatgggggaagatggttctatccaaggatttttagaagttttaaggatgccttatgttgggactaatattctatcttcaagcgtggctatggataaaattacaacaaaacaagtccttgcaacagtaggtgtacctcaggttgcatatcaaacttattttgagggtgatgatttggaacatgcgattaaactctctttagaaactttaagtttcccaatttttgtaaaaccggctaatatggggtcatcagtaggtatttcaaaagcgacagatgaatcctcacttcgctctgcaattgacttagctctcaagtatgatagccgtattttgattgaacaaggcgtgacagctcgtgaaattgaagtaggtattttaggcaataatgatgttaagacaacttttcctggcgaagtcgttaaagacgtcgatttctatgactatgacgccaaatatattgataataaaattactatggatattccagctaaagttgatgaagcaactatggaagcaatgcgtcaatatgcaagtaaagcttttaaagcaatcggggcttgtggtttatcacgctgtgatttctttttgacgaaagatggacaaatcttcttaaacgaactgaatacaatgcccggttttactcagtggtcaatgtatcccctgctttgggaaaatatggggctaacttatagtgatttgattgaaaagttagttatgttagctaaagaaatgtttgaaaaacgtgagagtcatttaatttaaaaaagttcaactaagtctttcttagttgagctttttcaaatctatgatatgttatgaaagtgtgttataatttaggagtatattcgtttataagggatagcatactatctacaacattgttgctaaataatagaaaaggaaatgatatgaagcttagtttgcatgaagttgctaaagtagttggcgctaaaaatcaagtatcagagtttgaagacgttcccctgggaaatattgaatttgatagtcgtaatatcagtgaaggtgacttatttcttcccttaaaaggagcaagagatggacatgagtttatagagatggcttttgataatggagcaatagcaaccatttcagagaaggaaatagagggtcatccttatcttttagtgtctgatgcacttaaagcatttcaagtcttggcacagtattatattgaaaagatgaacgttgatgttattgcagtaactggctcaaatggtaagacaacaactaaagatatgatagctgcaatcttatcaaccacatataagacttataaaacacaaggaaactacaataacgagattggcttaccctatactgtgctacacatgccagaagatactgaaaaaattattttggagatgggacaggatcatcttggagatatccatgtgttatctgaaattgcaaaaccacgtattgctgttgttactttgattggtgaagcacacttagaattttttggtagtcgagaaaagattgcagaagggaaaatgcaaatcacagatggtatgagttcagatggcatattaattgcaccgggagatccaattattgatccatatcttccagcaaaccagatgactattcgttttggtcatgaccaagaattgcaagtgacagaactcaaagaagaaaaacattccttaacttttaaaactaatgctttggagcaccaattacgtataccagtacctggtaagtacaatgcaactaatgcgatggtcgctgcctatgttggaaaattattagcagtagcagaagaagatatagtggatgctctagaaaatcttcaactaactcgtaatcgcaccgaatggaagaaatcagccaatggagcagatattttatcagatgtttacaatgctaacccaacggctatgcgattgatactagaaaccttttcagctattcccaataatgatggtggaaagaagattgctcttttagctgatatgaaagaactgggagaacaatctgtggatttacataatcaaatgattatgagtatcagacctgactctattgatactttgatttgttatggccaggatattgaggggttggctcaattagcaagccagatgttcccaattggtaaagtgtatttctttaaaaagaatcaagaagtagatcagtttgatcaattgcttgcaaaagtaaaagatactcttaaggagaaagatcaaatattattaaaaggttctaactcaatgaatctttctaaaatagttgatattcttgaagtaggataatagaggtgttagggtaacaagttaccctaacttttttgttttttaatcacgaataatattcagttttattgaggaaaatagatatgctaagcagaaaactggtgatatattcagttttttgataatctgtttattacgaactatatttttaaaaataaaacttaagttcgtttttaggaggattgtttgaaaaatttaaatcgttatgtagttgcggtttctggagtcgttttacatttaatgctaggatcaacttatgcttggagtgtgtttcgtaacccaatcatctcagagactggttgggatatttcatcagtttcattcgcttttagtttggctattttttgtctaggaatgtctgcagcttttatgggacacttagtagagcgttttggtcctaggataatgggaatgatttctgctattttatatggagcagggaatgtgttaacaggtttagccattgaaactcagcagttatggttactgtatgttgcatacggtattttaggaggaatcggacttggttcaggttatattactccagtatcgactattattaaatggtttcctgataggaggggactagcaacaggattcgctattatgggatttggctttgcttctttagtaacaagtccgcttgcacaatccttaatgattaggattggtgtaggtaaaacattttatattttgggattagtatatttttttgtcatgatgattgcctcacaatttattaaacaaccacctcaggaaaaaataactattttgactcacgacggtaaaaagaatgctatgaattcacaaattattactggattaaaagcaaatgctgctataaaatcaaaaaccttttacatcatttggttgactttgtttattaatatttcgtgtggcttaggtttaatatcagcagcttcaccaatggcacaagatttagcaggctattccgcagaatctgcagccttattagtaggggtactagggatatttaacggttttggacgtctgttatgggcaagtctctctgactacattggacgcccgttgacctttataatattatttattgtgaactttattatgacttctagtttatttttgtcattcaatgctattgtatttgcaatagcaatgtctattttaatgacttgttatggtgcaggcttttccttattacctgcttatctaagtgatatttttggaacaaaggaattagctactttacatggttatagtttaacagcatgggcaatagcaggtctgtttgggcccctattgttatcaaagacatattcatggggaaattcctatcaattgacattaatggtttttggttttttattcttattcggattattgttatctctatatttaagaaaattaacaactaaagttgtgtagtatatatctaatttaaaattctttggttttaccaaagagttttttctttgaaaaatagttttgtcttatagcaaataatttgatatactaagtatctagtaaaaaaatgatagaaagataatactaaaatgatagaattcttttctaatatcagaacagagattccgcagatgcctttacttatccatagtttgattttatctgtcttaccttttctgatgtggctgactttggttaatagagataagcctttgtataaaactatttggagtatccttttaggacttcagttaattacgatttatacttggtttttctgggcaaaattgcctttatctgaaagtcttcccctttaccattgtcgaataggcatgtttgtcgttctcttggcgaggcctggaatattaaaggattatttcgcattgttaggagtagtaggtggagtattggcaatgattcacccagacttttacccttaccagtttctacatgtgactaatattttcttctttattggacattttgctttatttgtccttagtttactacatctgatgacacagtccaatttggacaaattaaatccaaaattgattatacaactaacgcttctcattaatatgtctttgatttttattaacctcttgactggggggaattatggctttatgatgaagacaccaatactaggaataacaaatccctttttaaacctttttatagtgacaactctattaagttttctcgtcctatttgttaaacaaattttccaaaaagtgagaatgagagctagtcttaaaacagaagaatcttaattattttaatattattatattatctagctattaaaaaataaatagctggataatgtttttcatttttagctatttttatgattgaccgctaattattaatctgctaagatatagtacgtaataaaaacttaaccggttaattatttttgaaatatattttttctggaggaaaatagtaatgaataaatcattcaataccaaattaggtttggtaactgtagcggtattatcaggtattgtattaacgtctcaattacctgtgaacgctaaagctgagacaccagtaatggcagcaagtgcacaacaaggtttccgttttgtagcaaccgttgtagatagtcagacgcatgtcttgccgggaaaattggtaactttgtcagaggtgacaagtggtcagcctaaaattattgcaagtgtgaaaacgaatgatgccggacaagctatttttaataatctccctataaaacgtaaccttagtgtgtctgttgatggacaagtaaaaggatatactattcgaactgacgtagcaggttctagtaaagcagctagttttacagcaacaggagtagggacaaatgagccaacgtattcaaaaaaaaccatagacatcacagtgagagaccagaatgctgaacctgtttcaggcaggacagttaccttaaaaacacaagctggtcgtgagattgctagcttggtttctggtgacaatggattaactcgctttactgatcgtttactagatggaacattctaccaatattttgttgatgggaaaaaaattggtgatattgtacctggagaatcaagaagtgcatatgttaatgttgcacctaaaaaagattattttacctttacagtcactgctttagataaagatggacttgttgttaagggaaaagaagtaacgttgactgatattactgatggtaaagcagtagcgcttgcttctttaaaaacgaatgataatggacaagctatctttaccaacctaccattatcaagaaatatcagtgtttcaattgatggaaaatcaaagggctatactcttcgaactgatgtagcaggctctcataaagcggctgcattctatgtagatggtaaaggtaccaaagcacctcaatttagtgcagaagcagcggttgtaactgtttacgatgctaatggaaatactatagcaaaccaagaagtgacattaactaattcaaatgggacaattgttgcaaaaggtttgactgaaaaagatggcaaagcaaggttcgccaataaattaatggcaggaacgttatacaatatttttgtaaatggtattgagatgcctaaaactgcccttgttggtagtgatgtcagtgtttttctaacagataaacaaattaagaaagaaaaacctgttactcctgataaattggataaagaaatgaaccaagagaaggaaaaggagctcttagatactccaaaaccagtaccacctacttcgaaaccaacagcaccaattaaaaataaaaaggacgattcccctaagaagttcacgaaaagtcaatcttctagtttgaagtcaagtgttaaggctataggtgctaagccaaaagctatgacagccttagctaaaaaattgcctaaaactggtgatcaagccattagtattttaactttggttggttttattgtaacagggttagcgattatgttaggcttccttaaaaaatcacgatcaaaataatttattttagaagcttgggtctttagacacaggcttctcttctttcttcggaaatagattgaacttgaagaatgttgttaaattcgctataataataaagttatagacaagattattgtttcagttgagactactgaaaataatactaagaaatggataaaagctaaggattgaatatgacattacaagacgaaatcaaaaaacgccgtacttttgccatcatctctcacccggatgctggtaagacgactattactgagcaattattatattttggtggtgaaattagagaagcagggacagtaaaagggaaaaaatcaggtacttttgcaaagtccgactggatggatattgaaaagcaacggggtatctctgttacttcatctgttatgcaatttgattacgcgggtaaacgtgttaatattttggatacacctggacatgaggatttctcggaagatacataccggaccttaatggctgtggatgcagctgtcatggttgtagattcggctaaaggtattgaggctcaaactaaaaaactttttgaagttgttaagcatcgtaatattccggtttttacgtttattaataaattggaccgtgatggacgtgagccattggatttgcttgaagagttagaagaagtactaggtattgcttcttatccaatgaattggccgattggtatggggaaatcatttgaagggctttatgatttacataataaacgtttagaactctataagggagacgagcgttttgcaagtattgaagacggtgatcagctgtttgccaataatccattttatgaacaagtcaaagaagatattgaacttcttcaagaagcaggtaatgacttttcagaacaagctattcttgatggtgacctaactccagtattctttggctctgcccttacgaactttggagttcagacttttcttgatactttcttggagtttgctccagaacctcatggtcacaagactacagaaggtaatgttattgaccccttggctaaagatttttcaggttttgtctttaaaattcaagctaacatggacccacgtcatcgcgaccgtattgcttttgttcgtattgtttctggtgaatttgagcgcggtatgggagttaatttgacacgtactggtaaaggtgctaagctctccaatgttactcaatttatggcagaatcacgtgaaaatgtgacgaatgctgttgctggggatattatcggggtttatgatacaggaacttatcaagttggggataccttaacagttgggaaaaataaatttgaatttgaaccattaccaacttttaccccagaattatttatgaaagtatcagcaaaaaatgttatgaagcagaaatcattccacaaaggtattgagcaattagtacaagaaggagcaatccagctttataagaattatcagacaggcgaatacatgctgggtgctgtgggtcaacttcagtttgaagtttttaaacatcgtatggaaggtgaatacaatgctgaagttgttatgacaccaatgggtaaaaagactgtacgttggattaactcagacgatttagacgaacgcatgtcttcaagccgaaatattttagcaaaagatcgttttgaccaaccagttttcctatttgaaaatgattttgcacttcgctggtttgctgataagtatcctgatgtgaagcttgaagaaaaaatgtaaaatttaaagtcactcaaatttgagtgactttttaagttttttagactaaaatagttataatacatagaaaagattggagattaacatgggaattttttcgggattaatgggaaatgcttcacaaatggataccgataaagtcgagaatcagttatctgatattctgatttcagatgaacaggttgatttagcttataccttaattcgtgatttgattgtttttactaattatcgtttaattttagtcgataaacagggggtgacaggtaaaaaggtttcttataattctataccttatgcttctatatcacgttttacagtggaaactagtggtcattttgatttagatgctgagttaaagatttggatatcatcagcaatagaaccagcagaagtacttcagtttaagaacgaccgtaacatagtgagtatacagaaagctttggcgacagctgttttaaaataaacaatttagcagtagtgatttttatcactgcttttattttgaagtatagtaggcctcaagcatatattttgaaaacgctgtatttttttgataagatatttttttgaggagtattaaataatgataatagaattaaagagtgttggaaaaatttttccaaaatcacagtttagattagatgatatttcttttaatatagaagaaggcgagatagttggtctgattggttctaatggtactggaaagagtactattttgaagatgattaatggcttaatcccttatgataaaggaaatatttattatcaaggaaaagaagtgaagtctttttctgataataagttacgtcagatgcgtaaagatattgcttatatttttcaaaatcataatttgttagcaggagaaagtgtatattatcatctagctttagtttataaattaaatcatcaaaaagtaaatcatgacgcaattaatgatatcttagattttttaggtttgatggatttaaaacaggtgaaatgccatagtttgagtggtgggcagcaacaaaaagttgcaatcgctatggctgttttgcaaaaaccgaaacttattctatgtgatgagatcagctctgccttagatactaatagtgaaaaagagatatttaacttgttgtctgatcttcgtgaaaaatatggtatctctatcttgatgattgctcatcacctatctcttttaaaacaatattgtgatcgtgtaatgattttggatcaccagactattgtagatactgttgttccagtgaaagcaactctgaatcaattaaagtcaaactacgtagatcaagtaaaggagtttttgttacatgattgacattattgaaaaacatggcgaaggtatcttaaaatcattttgggaaaccaatttaatgttagggttaaccttgattctttgttttctaattgcttttccaacaggtattttattgttttcattgagaaagtcttacttgattaaacattctttagcctatcaactactaaatttatttttaggtacgttacggagtgtccctttccttatttttatttttatcttaatccctctcaatcgattaatttttgggacctcatttggaacgatagcggcaatcttacctcttactttggtttcagtcagtttgtatgcacgttatgtggaacaagctttattaaatatacctcaagttgttgtagatcgagctctcagtctaggggctaacaagagacagataatttattattttttaatcccctccatcaagattgaccttgttttatcatttactgcaacggctataagtattcttggctactcgacaataatgggagttattggtgcaggaggtttgggtgaatatgcctatcgttttggctatcaagagtatgactacccagttatgtacttgattgttgtcttatttataatatatgtgtttatcttacagagtttgggctattttatagcaaaccgctactcaagaaaataaaagaaaagaggaactatgaaaaaattactttccctaacatgtctaatcatgatgtctttatgtttagtggcatgtactaagcaagcaatgtcgtctaagaaaattaaagataagaatagtaaagaaaaggtgattactgttgcaacttacagcaaacctacatctacctttttagatttggttaaagataatgtaaaagaaaaaggatatactttaaaggttgtcatggtctctgactatattcaggctaacattgctttagaaaacaaagaacatgatgctaaccttttacaacatgaatttttcatgagtatctttaataaggaaaatgatggtcatctagtatcaattacaccaatttatcattcattggctggtttttatggtcaacatttgaaaaatattgccgagcttaaagacggtgctaaggtagcgattccgtctgatcctgccaatatgactagagctctgctattattgcaagaaaagaaacttatcaccttaaagaatacgtccaaaaagaccaaggctatcgaagatattattactaaccctaaaaaattacgaattgaacctgtagcattacttaacctcaatcaggcctattttgaatatgaccttgtctttaatttccctggatatgtgacaaaaatcaatctagttcctaaaagggatagattattatatgagaaaaaaccagatatccgttttgcaggtgccttggtagctcgtgaagataataaaaatagtgataaaataaaagtacttaaagaagtactaacaagtaaagagattcgtcactatatcactaaggagattccaagtgaagcagccgttgcgttctagatagataaactatgaaccctccttctttatagatggtgggtttttattgccttttttctattttctgaagcaactaatagaactagcaatttatgaaagcgtgttatttattagattgaccttattttatatctttttacttttaattgtgttacactaagtaggttgtcagaaaagataactaataaaggttcataaggcagcttcgcactgtcttttagaaaagagaaacatttgaaatttacagaacttaacttatcgcaagatattctttcagcggtagaaaaagcaggctttgtagagccatcaccaatccaagaaatgactatcccacttgctcttgaaggcaaagatgtcattggtcaagcgcagacaggtacaggaaaaactgcagcttttgggttaccaactttaaataaaattcatactgaagataatactatccaagcacttattattgctcctacacgtgaacttgcagtacaatcacaagaagaattgttccgttttggacgcgataaaggtgttaaggtccgctctgtttatggtgggtcaagtattgaaaaacaaatcaaggcattacgttcaggagcacacgttgttgttggaactccaggtcgattacttgatttaattaaacgtaaagcacttaaacttaatcacattgaaactcttattcttgatgaagcagacgaaatgcttaacatgggatttttagaggacattgaagcaatcattagtcgtgtaccagaaacacgtcaaactcttttattctcagcgacaatgcctgatccaatcaaacgtatcggcgttaaattcatgaaagatcctgagcatgttaaaattaaagcaactgaattaactaatgtgaatgttgatcagtattatgttcgtgttaaggaaaatgaaaaattcgatactatgacacgtttgatggacgttgatcaaccagaattgtcaattgtctttggacgtacgaaacgtcgtgtagatgaattaactcgtggactaaaattacgtggtttccgagcagaaggaattcatggagacttagatcaaaataaacgtcttcgtgttatcagagactttaaaaatgaccatattgatattcttgttgccacagatgttgctgcgcgtggtttagatatttcaggcgttacacatgtttacaactatgatattccccaagatcccgaaagttatgttcaccgtattggacgtactggtcgtgctggtaaatctggtcaatctatcacttttgtttcaccaaacgaaatgggatatttgacaattattgaaaacttaactaaaaaacgtatgactggaatgaagcctgctactgcaagcgaagcatttcaggctaagaaaaaagttgcattgaaacgtattgcacgtgactttgaggatcaggaattagtttctaaatttgataaatttaaagccgatgctttagaattagcaactcaatacacaccagaagaacttgctctttatgtcttaagcttaacagttcaggatccagaatcgttaccagaagttgaaatcacacgtgaaaaaccattaccatttaaaccatcaggtggtggctttaaaggtaaaggtggacgaggcaatggccgtggtggcgatcgtcgacgcaatgatcgtggtgatcgtcgtggaaatcgtgaccgtgatgatcgtggtagtcgttgtgattttaaacgtcgtgatgataagttcaagaaagataatcgtcgtcaagaaaataaaaaacctcataaaaacacttcaagtgaaaaacaaactggatttgttattcgcaacaaaggcgataaataagaggattatgaaaaaggagttgctgagcgactccttttttattttttgtaagataaagcgtagatagtgatatccataaaattgccttataactttaagaatgaagacaaaagattaaagtgaggttgaaatttaaaagttaaagaagcgaggataggctcattacacttagtatattatcgtattattgttcatttttatgttgtttaatataagtcaattttgcttgccgagtcttttgtttaaataatgcttctgccctcattgcttcttgtttgctattaaaagcttcagaataaagaagttttactggcaatctcgcacgagtatatttagcaccttttccagtattgtgtgtattgagacggcgcttgacatctgtagtataacctgtataaagtgttccatctgaacattctaaaacatacatataagcaggaactttaatcatgagattttccgttttctccgaaatatatatcaaaaatagtctcagtatagtctccattatcttgatgaacaacaagaggaggaagtattttcataccttctgtcgagccatctttaatagcttcaattaaaagcatattagcatcttttcctaattttggataaacaaattggatacgtttaggtgctaaattgaactgacgcatcgtatcaataatttcaaggaaacggtctggacgatgtaccatagcgatacgtccttttgtttttagagcatgttgagcaatttgacaaatctctctaaggtttgttgttatttcgtgtcttgcaaggagataatgcgggcttagattttttttagaggtttcgcttgctttgaaataaggtggattgcaaagcattaaatcaacgtttgaacgttgaacatgatcaagaagattttttaaatcatcattaatcatagtaacctgtttttccaatttattgagcttaatcgaacgcttagccatatccgcaaggctctcttgtagttcgatctctataattgtcgcatttgttttggtgctggcaaacaaaccgacagcaccattaccactacataagtcaacgataagaccacgagaaggaagtttagggaaccgagacaataaaacactatctatggaataggaaaaaacttctttgttttggatgattttgacatcagttgaaaaaagctgatcaatgcgttcattttcttttaaaattgtatctatcataggcttattatagcaaaattacagcttcctagcactagttttgaaagtgtggaggttgattttaagataattctttctaaaaaaaaggaagcatgataaaatagaagttacttgatgaaaggtagaggagaaacatgttctatacttacttacgtactttagttatgttcttgatttgggtggctaatggtaatgcgcactatcataatgaagataaaatgttaaaagatgatgaaaattatattttagtagctccacacagaacattttgggatcctgtgtacatggcttttgctgctagacccaaacagtttatttttatggccaaaaaagaattattcacgaatcgtttgtttggttggtggattaaaatgtgtggtgctttccctattgatcgtgaaaagccagggcaagatgctattcgatatcctgtaaagatgctgaaaaatagcaaccgttctttggtgatgtttccgagtggaagccgccactccaaagatgtcaaaggaggcgtagctgttattgcaaaaatggcaaaagtcagaattatgccagcagcatatagaggtcctatggtttttaaaaatctattaaaggggcatcgtgttgatatgaattttggtaaccctattgatgtttctgatattaagcgtatggatgccgaagggattgcagaagtatctcgtcgtattcaggaagaatttgatcgtttagatagagaaaatgaaacttatgatgatggtaagaaattaaatccattgacttatatttatcgtctacctttagcaattatagctattgtcttgcttgtcctaactctaatttttagttatttagcaagctttgtgtgggatccacaaaaacatctaaaataagggttacatggaaactatttactttttagtaaatagtttttttggtttttaataggaaaatctctttagttacgaataagtaaatggaggaatatttttatgtttgaaatagtattggaaaaaattaaatcgcataaatgggagacaacaggaattattgtaggactcttattatttggaattttgggtttaaatcattttggcactcatcataaagaagacaatttaaatatcaatttagagaaaaaagtatcaactataacagaaaaaaaggtaccaatgattagtcacgtcaaagataaagtatctaatcaagtaacggttgacgtaaaaggggcagtcaatcatccaggtgtttatagtttgccttctcaaagtcgtgtaacagatgcgattaagcgtgcaggtggactaagcaatctcgctgatagtaaatccgttaatctagcacagaaattacaagatgagacggttatctatgttgctcaaaaaggtgaaaaaataactgttgtggaagaggagaaagcaaataatatcgctactcagggaaatagtaaggggaaaattaatcttaataaagcagatttatcaagtcttcagaccatatcaggcgttggggctaaaagagctcaagatattttagattatcgtgatagtcaaggtggttttaaaactattgatgacctcaaaaacgtatcaggtattggtgagaaaacactagaaaaattacgtcaagatgttacaattgactaagtattttcctctaaaacctatttatttagcattgttggtcttccaaatttacttactagtgttttcttggacaatgcttggttgtgcctttcttttattttcttttatttttctgatttatcaatatgatcgtgaaactatttttaaaacaatagcaatagtaatttttttcttattttattttttatggcaaaatcacaatatgaatgtccaatatcaaagagtaccgaatcatattagccagattaaagtgcgtattgatactatttctatcaatggtgatgttttatcattccaggcagatgcttcaggtaacacttatcaagctttttacacattaaaaaataaaagtgagaaagattattttcaaaatcttgataataatataatgataattgcagatatcaaacttgaagaagcagaggagagaaggcattttaatggctttgattatcgtcagtatttaaaaagacatggaatttatcgtatcgccaaagtgacaaagataaaacagatacgcttatttcaacataggtctttctttgctcttatgtctaagtggcgtagaagtgcaattgttattagtcaaacttttccaaatcctatgcgtcactatatgtcagggcttttgtttggatatctagataagacctttgatgacatgtccgatttatatagtagtctaggtattatacatttatttgctttgtcaggtatgcaagtaggtttttttctcggtatttttcgttatatctgtctacgtattggcttacgtctagaccatgtttggttacttcaaataccattctcgctaatttatgctggtttaacaggctttagtatctcagtcgttagggcacttattcaatctttattatcacatagcggtgtcaagaaagatgagaactttgctctctgcttgttaatttgtcttatctccctcccccactcacttttgactacgggaggagttcttagctttgcttatgcttttatacttacgatgacctcctttgatcatttttcgagtataaaaaaagtagctatcgaatctttgacagtctctgtaggaattcttcccatactaacctactatttttcgggttttcaaccaatatcaattatattaacagcacttttatcttttgcatttgatattatatttttgcctttattaactgttatatttgtcttatcgcctatcgttaaattaagttgtattaatagtttgtttgaaatcctagaagtgttattaaaatggactgggcaactgtttccaaggccacttatttttggaaagcccagcctttttcttttaatagtcatgattataattttgggattactttatgattattatcattctaaatgttttcgttattgctcccttcttattatctttaccttgttttttatcactaagaatccaattactaacgaggttgcgattttagatgttggacagggagatagtattttagtgagggattggttaggaaaaacaattttaattgatactgggggaagggtgagatttgaacagcctgaagaatggaaacaaaaagtaaatcagtctaatgctaagagaacgctcattccttacttgaaaagcagaggtattagcaagatagatgatttagtgataactcataccgatacagatcatatgggggatatggaagttatctcaaagcattttaaagttgcacgtttgattacaagttcaggttctttaacgaattcgcagtacgttaagcatttatcaaagataggtgtagcggtaaaatctatagaagccggtgataaacttgctgtcatgggaagttatttacaagtactttacccatggcacaagggtgatggaaaaaataatgattcaattgttttatatggacatttattaggaaaaggcttcttatttaccggtgatttggaggaagagggagaaaagcagttattagaagcttatcctaatttatcagtagatatccttaaagcaggacatcatggttctaagggctcatcaagtctatcctttctgaaaaagttgtctcctagtgtggttctagtttcagctggtaaaaataatcgttaccagcatcctcatcaagagactttacaaaggttccaaaagattaaaagcaagattttccgaacggatcaatcaggtacaattaggctaacaggatggtggaagtggcatattcagacagttcgttgatttataaaaatgattgcgtatctgttaaatacaatctatttttcgcaagaattcagtaattttaagcttgacatggaacgggttccagcatttatactgatttcagaagaagagaggtattttttatgactatcaaacgtattttttgtgacatggatggtacactattaaatagtgaaggacaagtgagtaaaagtaacgctaccttaatacgtgaggcagcgattccagtaactttagtgtctgctagggcacctatggaaatgaaggatgccgtagatgcacttcaattaggaggagtccaagttgcttttaatggaggattgatttatagaataggagataataatcaagttctacctattcatacacaaatcattaaaaaaagcacagtaaaacaattgctaagaggaatacggtttcattttcctcaagttagtttatcttattacgatcttaataactggtattgtgataaaatagatgaaggaatccgatacgaacatagtttaactcaacaatgcccaacgtttattcataatgaggatcagtttttagaaggtcacacaaatacttttaaaattatgatgattactttcgatgaagcaaatatgctagaattagaaaaatatcttcaaagtttggagttaccagaaatcactattcaacgttcaggtaaagcgtatcttgaaattacacatctcttagccaaaaaatctaaaggaattgcttacatccttcaaaaagagcagttagctagagaagaaacggctgcatttggagatggacataatgatttgcctatgcttgaaatggtaggttaccctattgttatggataatgcttttgatgatatcaaagcgatagcatatcaactaactaagtctaatgatgaagacggagtgggatatgggattcaaaaatttttaaagtaggagccttataatgacaagtattagtgatatagctaaaaaggcaggtgttgctaaatcaacagtttcccgtgttatcaatcatcacccacatgtttctgatgagacgcgacaaaaagtaatggctcttatcaccgaattggattatataccaaatcaactagcgcgggatttaagtcgaggcaaaacacaaaaaataggtgtcgtcattccccacacgcgccatccttattttacacaattaataaatggcctattagatgctgctaaaactaccgactatcaacttgttatgatgccttcggattacaaccaagaattagaactttcctacttgaaacagctcaagatggaagctattgatgctttaatattcacttcaagagcaattagcctcgatattattgaaacttatgcaaaatatggacgaatagtagtttgtgaaaaattgcaggaatataatcatctatcctctgcttaccttgatcgctattcttcatttctagaggcgttttctgatatgaagttacgaggtttggagcacttagttttattattttcaaggaataatgaatcctctgctacctatcaatccgcattattagcttatcaagaggtctatgggcaactatcctctccatatatggtagttgggaatgttcatgactttaatgatggactaaatttatcttatcaattggtaaaagaagttagtatagatggtatattagctacaagtgatgaagttgcggcagggctaataaaaggttatgaagaaagtaggaaaaaatgtccttatattattggtcaggaatgtttattagttgggcaacttttgaaactcccaacaattgaccacaaatcctattatttagggaaattagcttttaaacaggctttagctgaaaagattagtcaagaagttttattctcagagtttttatctcaagacaattagtcattcaaaagtaatagaaaaaaggtttccaactaaacttgattggaaacctttttatttaatgattgataattttaagcatttgtttgaaagcagtctctgcttcaggaatcggtaagactggataaacgtggttcattttttgaccaacgatatagtggtgtttaatgttttcttttgctaatttttgatgtaataattgattatcggggtagaaaatatcgtgcgttcctataaaaaatgatattggagccatcttgttaaattggctactgtaaagaggactaacttgaggatttttaaaattcttttttccatttgcccagtaaggagctacttgttgtaattgccaagctttaagaaggggatcttttttttgaactttttcaatctttggattattagtagcaatatctaaccatggtgatattaaaataatttcttttggttgtttgatatgctccgtgacaaggttatcagcaagacctaaagcaagacctccgcctgcactttcacctactaggataatttgtttgggagatgtgacgctagctaatgtattttggtataattttttaattttggggatagcatcactataattatatgtaggagctttagggtaaataggaaagacaacttttgcatctaattttttagctagtttattgacaaaaatatattgtaattcagaagcttgatggatatatgatcctccatgaacatagaagataaccttttgcttaggattatttttatcattccaagtgaatgtttgcatgccatcagtagcggtaatttctaccttttcattatttaatgcctgaggaatgtctacaggaagaacattacgtttagctaccttagttaagtaattttggtattctttgatggtttgaggcttaatctgatttaccacaggtagagttttttcaatagtattgctagttagggatcttttttcaacaatatgagtgtaagcatatgctcccataaaaatgacaaaaaaggttagaagtagtagtacaataagttttcgatagtttttcatgattatccttttgtaattgagctcgtcatgctaaaaatgattagttgttattctataataaagtagatacgaaaacaagaaaataatgctataaaatttcaacctattataattttttgctgatagtacgtattaacctttaatttgctaaaatagaagagaggagagtgttattatgtttcacagagaagatttttcaaaagcattattaaaaaaagctttgcagcccggtatgagagttatggatattggttgtggtagtggggaattgacgcgtttggctgctgatatcgttggtaaagaaggtgatgttgtaggaattgatattaatgagcaacttttatggcaagctagacatgataatggctatgctaatgttagttatcaaaacgcagatttagcagcactttcctcctttgaaacaaaaagttttgatgcaattattggacgtcgtgtattaatgtatcaaaaagatccaaagaaagtaatagaaagtttaacacctttgttaaagccaaatggtttttatgtttttcaagaaagtgatgcaatgtgtttagaactagctaagcctagctttgtaaatatgaataaaatacaatcactaatctggcaaactgttgagaaggaaggaggacacattcatattggaagtcaacttgagcaattaatgttagaagcaggcttaatcgttgaccattttgtatcagaaaatgtcattcaaacgtcacaaactggtacagatttatcttggctactaaatatcatgaaagaaagaatacaaaaatatagtgaccttcagggattagaagatgtcaatttacaaaaagaattagaagagaataatgaccattttatccgagattgtcaatttggaattatttctcatagagttgatgaatgattttaagtattatttgacaccttgaaaagtttccttatggtataataaggaatatgattgcgattgaagaaattgggagaattaccccagataatttagggttagtaactgttttagcaggagaagatttagggcaatatgctcagatgaaagagaagctatttcaggtaattggattcaataaagacgatttagcctattcttattttgatttaagtgaagaagactatcaaaatgcggaattagacttagaaagtttaccttttttatcagactacaaggttgttatttttgatcagtttcaagatattacaactgataaaaaaacttatttagatgaacaagcaatgaagcgctttgaagcctacttgcagaatcctgtagatactacgagacttgttatttgtgctccaggaaaacttgatggaaaacgtcgacttgtaaagttattgaaacgtgatgctcgtgttttagaggctaatactttaaaagaatcagatttaaagacgtattttcaaaaatatgctcaccaagaaggattagtttttgaagcaggtgtttttgatgagttattgattaagtctaactatgattttagtgatactttaacgaatatcgctttcttaaagtcatataaaacagacggtcatatttcgtccaatgatgttagagaggctatccctaaaagcctgcaagataatatatttgatttgactcaagatgtcttacttggcaggatagatttagcgcgtgatttagtaagagatttacgtctacaaggcgaagacgaaatcaaattgattgcaatcatgttaggacagtttcggatgtttttgcaagttaaaatattggctagtaaagggaagtcagagagtcaaattgtttctgaactatcccattacataggacgtaaaatcaacccttatcaagtaaaatttgctgtcagagattctagaaaccttccccttgcttttttaaaagaagcgattaggattttaatcgagactgactatgctattaaaagagggacttatgataaggattatctctttgatttagccttattaaaaattgctcataaaaagccctaattaaagaaacaaaagagttgaaagctgttccaaattcctatagaataagggtaataatagatgaaaagaggatttcgacatggcaattattttaccagatttaccctatgcatatgatgcgcttgagccacatattgatgctgagacaatgacactacatcatgataagcaccatgcaacttatgttgctaatgcaaatgctgctcttgagaaacatcctgaaattggagaagacttagaggcgctcttagctgatgtttctcaaattccagaagatattcgtcaggcagtcatcaataacggtggtggacatcttaaccacgctcttttctgggaattgatgtcaccagaagaaactcaaatttcacaagagttatctgaagacattaatgcaacttttggttcatttgaagactttaaagctgctttcacagcagcagcaacaggacgttttggttcaggttgggcttggcttgttgttaatgctgaaggcaaacttgaagtgctttcaactgccaatcaagatactccaattatggaaggcaagaaacctattttagggcttgatgtatgggagcatgcttattacttaaactatcgtaatgttcgtcctaactacatcaaagctttctttgaaattattaactggaataaagtaaatgaactttaccaagctgctaaagcttaataaaaaacgagtcgataggctcgtttttttattattctaaaagttgataatgttttttaaaagtctagaagtccaaactcagataaaactagaatagtcctattatcttcaactaagcgaataagtttattgaaagcgcttgacaagattagtaagaaatgataaaattaagacgttttcaggtgttattatttaaggtaagcaagctgataacagataaaattgcataataaaggatgttatcacattttgtgagcagggacctattcaacgacgactttttgttgtgtcttggatgggtcattttttattgtgcgagtgaaggactaggactttaatgattataaaacgcgtattaaatcataatgcagtcatatcagtaacacatcaaggattagatgtgctactgatggggaaaggaattgcatttaagaaaagaataggtgataggattaatagcgatgctattgagaagtcatttgttttaaaaaatagtgataacatgaaccgttttacggagttatttattactgttccagaagaagtagttgcatgttcagaacgaattatcaacctaggtaaaatcaaattgggtaagaacttagatgaaattctttatatcaatttgacagatcatattcattcggctattgaaagacatgaacaaggaatggttatccaaaatccactaaggttggaaatccaacgttactatcctgatgaatactccattgggatgaaggctctggaacttataaaggatgaattgggcatttgtttaacaatcgatgagtcggcttttattgctatgcactttgtaaatgctggattggataatccgtttaatgaagcgcataaaatcactgagattgtatcttacattgaacagaaagtaaaaatagattttcgaacagaactagatgaaagttcaattgattattatcgtttcatgacacataccaaattatttgctcaacgcgttttatcaggaatgaaatacgaagatgatgatgctgatttacttttggtagttaagaaaaaatatccgagagaatataaatgtgttaaagagatcggcaacaatatggctatccaataccaatatcaacttaattcaagtgaactcctatatctgacggtgcatgttaaacgattagttaaaaatttaaaggagatatcagatgactaaataccaagagactgctaaagctattttagcagcagtagggggagaaaaaaatattcaacacgtaacccactgtgtgacacgattacgattagttttagacaatgatgaaattgtcaacgatcaggttattaaaactattccgaatgttatcggtgttatgcgtaaaaatgatcaataccaaattattttgggaaatgatgtcaataattattataatgcttttttggccttaggtcattttgaaaatactaccagagaattttcatcacaaaaaaagagttcaatacttgagaaattaattgaaacgattgcaggagtcattacgccgcttatacctgctcttctaggaggagggatgctcaaggttataggtattttgctccctatgctcggtatagcaagctctagttctcaaacagtagcttttatcaatttttttggtgatgccgcttattattttatgccaataatgattgcttattcagctgcgtcacgatttaaagttacacctgtattagctgctacagtaggagggattctcttacaccctgcttttgtgacaatggtagctgaaggaaaaccattatctttatttggagctccggttacactggctagttatggttcttctgttattccaatcttaattatggtttttcttatgcaatatattgagagatggattaataaaattgttcctagtgtaatgaagagttttttacaaccgactttgattattctcatttctggctttttagctttagtggtcgtggggccactgggggtaattattggtaaaggattgtctagtgcaatgctttcgatttaccatgtggcgccatggttagctttatctattcttggtgctattatgccattggttgttatgacaggaatgcactgggcatttgctccaatatttttagctgcttctgttgcgacaccagatgttttgattttaccagcaatgttagcttctaatttagctcaaggtgcggcttctcttgctgttgcagttaaggctaaacaaaaacaaacacgtcaggtggcctttgcagcaggtttatcagcactactagctggtatcacagaacctgcactttatggtgtcacactgaaattcaagaagcctttatacgctgcaatgatatcaggtggtttagtaggagcttatattggattagttaatattgcttcctatacatttgtagtaccatctattattggtttgccacaatatatcaatccacaggggggcaataatttcagtaatgctgttattgcagcaatagctactattattttgactttcattattacatggttcttgggaattgatgaaggagaaaacgaaaaaagtagtattaatgctcaagagcacacacatattagaagtggtttatcaaaaaaagagacattgtattcacctatggtaggcaatgtattacctttatctaaagtacccgatgaaacattttcatctaaattactaggtgaaggtttagcaatcactcctagtgtgggtgaagtttatgcaccatttgatggtgaaattataagtttatttcctacaaaacatgccattgccttaaaggatgataagggagtcgaagtgttaatccatattggaatagatactgtagaactaaatggagaaggttttgaacaattggtcaaagttggcgattttgttaaacgaggacagttacttttgcgaatggatattgattttattagttcaaaggggtattctcttattagtccggttgtagttacaaattcaattgaccaacttgaaattatcgttaaagacgcagagacaatggttacaaatgaagatgatttacttgtaattctttaaaaggaaggatgataatatgacggtttttcctaaacattttctatggggaggtgcagttgctgccaatcaggtagagggtgcatttagaacagatggcaaaggtttatctgtacaagatgtacttccaaatggtggtttaggcgatttcaccgccaaacctactccagacaatttgaagctagaagcaattgatttttatcataactataaaaatgatataaaactgtttgcagagatgggctttaaagtttttagaacctctattgcctggtctcgaatttttccaaatggtgatgatagtgctccaaacgaagctggcttacaattttatgataatttatttgatgagttgcttaaatataatatcgagcccttggttaccttatctcattatgaaacaccgcttcatcttgcaaaaacttataatggttgggctgatagacgtttgatagcattttttgagaaatttgctcaaacagtcatggagcgttataaagataaggtgaaatattggttgacttttaatgaagtgaattctattttacatatgcctttcaccagtggtgctattatgaccgacaaatcacaactaagtcctcaggagctttatcaagctattcatcatgaattagtagcatcggctagagtgacaaaattagggcgttctatcaatcctaattttaaaattggctgtatgattctggctatgccagcttatcctatgacatctgatccaagagatgtcctggctgcaagacaatttgaacaacataatctgctattttcagatatacatgtcagaggtaaatatcccacttatattcagtcctatttcaaaaataatggtattaaaattaaatttgaagaaggagatgaggaagtattggcacaaaatacagtagattttctatcgtttagttactatatgagcgtgacacaagcttatgactttgaaaattatcaaagtggtcagggaaatatccttggaggcctaactaatcctcatttaacaacttcagaatggggatggcaaatcgatcccatcgggctacgcctagtcttaaatcagtattatgaacgttatcagattccgttgtttattgtagaaaatggattgggagcaaaagatcaattgatagaaacactagacggtgattatactgtcgaagatgattatcgtattgattatatgaatcaacatttagttcaagttgctaaagctattgaagatggtgttgaaataatgggatatacatcttgggggtgtattgattgtgtatccatgtctacagctcaactaagtaaacgttatggtctaatatatgttgatcgaaatgatgatggaacagggagtctacaacgttacaagaagaagtcatttggttggtaccaaaaagtgattaagacaaatggccaatcattgtttgaacatcataacagataacatgttaaacaactagtctctgtttcaatttaatataaaaaggagtatccataggttactcctttttattataatttatgaaggttaatatcttctgatttaagtgctagatacaataaagttgcatccttaaagtttcttggattgagttgcgttgattcataaatcttatttaacctatattgaacagtatttttatggataaaaagttcctgactacattcttttaatgatagattatgcttaaaatatgagttaagcaagatcttatcattttcagataagtttacaagcgctttatttagcacatattgtttaatattagaatcaatacttgttaataacagttcaagatcaaggtcgtcgacgaggttgaccttttgttgaccttttaaagctttcagggctaagatagacgtttcatatgatctttttaaaagtgataaagatgatttttgtccgataccaactttatagaggcccttttcgcattcaaactttgataggatatttggataataatagtcaaacatatggtcagaaagtaaaagccagtattgattgggataattaaaggtataaatagcagtgtcaagtttatcaaaaaagttcaagagtgacatttcagattgacttaagagtaatttttgtttttgactattgatttcaaaagtgagtagacgatagtcagttttttctgataggtggtattggtttaaaaattgattgaggtaatagtagtctaactctctgccttcaacaagatgatgtaagacaatagaagcttcgttttttcgcccgaaatccagataatctaattcatgctcttttaagatgagtcgagtcattttttgagcaagtaaagcatattttcctacttggttggggtttccactaatcccaatagtagctaataattcacaattataatagaaaggaatattgatccctgcttgtgtcccaaaataagattcttgatctgttacttcaatcatttgtcctgtctgtgctacttttaaaccaatttcatggaattctccaacacgttttggattggtactagcgaaaatgattcctttggtattaataaaattaatatcttgttgacaaacatctttgatagaggtaacgatttgttgtgcgagttgttttcttaatttcattcagcttaccttttgttatatataacaaatatcatatcataaaaacgctaacatttgttctgtagtctatattttttgttatttgattttgttactataattgagtgatataaaatagtgaaaaaaataacaaagattcacaaaatattttcaaggaggttttcaaatgaaggtagtagtagctattgattctttgaaagggagtctttcttctttagaagctggcaatgctataaaggagtcaattaatgaagtaatctcaggggcggatgtggaagtacatccattagcagacgggggagaaggaactgttgaagctttgacgctaggtatggggggtacgatcgaaacaatccctgttaaggggcctcttggagaaaaagtacatgcgagttatggtattattccacagcgtcagttagctattattgaaatggctgcagctgctggtattaccctaattgctactgaagagagaaatcctctccacacaaccacttatggagttggagaaatgataaaggatgctataagtaaaggctgtaggcactttattattggtattggaggtagtgctactaatgatggtggggcaggtatgctacaagctttgggatatgcattattagataaagataatcaagaaatcagtttgggagcacaaggattggcagatttaaaatctatctctactgataaggttattgaggaattaaaagaatgtgattttaaaattgcatgtgatgtaacaaatcctttatgtggtgctcaaggttgtagttcgatttttggaccgcaaaaaggtgctgatgaagatatgattacaaaaatggatacttggttaagtaattatgctaccttagctacttcagttagtgaaaaagcagatgcaactattgaaggaacaggtgcagcgggtgggcttggatttgcctttttagcctttacaaatgctaccttagaacctggtattgatattattctatcagaaattaatatagaaaaagcgatttctgaagctgatttagtagttactggtgaaggtcgtttggatgggcaaacggtgatgggaaaagctccaattggcgtagcaaaattagctaaaaaatatggtaagaaagtagtggcattttctggatctgtcaccgaagatgctatactttgtaatcaacatggtattgatgctttttttccaatcgtacgacgccttatcagcttagatgaggctatgtctaaagaggtagcttataaaaatatgaaagaaactgctactcaagtctttagattaatcaatttgtataatcattaatattgaaaggaattttgataagttatggaagctacatttacaacaacaggggctttaataggattagcgcttgctattttactgattatcaaaaaagttcatcctgcctatagtctcattcttggagcattagttggtggtttgattggtggcggtgatttagttacaattgtcaatacaatggtattaggtgcgcaagggatgatgtcatccatattacgcattttaacatcagggattttagcgggtgctttaattaaaaccggatcagctgaaaaaattgcagaaagtatcattaaaaaattaggacaacagcgagccatcacagctttagccatcgcaacaatgattatttgtgcagtaggtgtctttattgatattgcagttattacagttgctccgattgcattagcaataggtaaaaaagctaatctttctaaatctagcatactgttagcaatgattggtggtggtaaggctgggaatattatctcacccaatcctaatacaattgctgcttcagaagcatttaaggttgatttaacaagcttaatggtacaaaatattattcctgcaattgcagctttagtagttacgattatattagcaaagattgtttccaagaaaaataacgatatttcttatgatagtgaggagcaagtgggctctgatctgccagcattcttaccggctatttctggtccacttgtggttatctgcttattagctcttcgtcctttatttggaatcactattgatcccttgattgcactgccgttgggtggtctaattagtattttagcaacaggttacctaaaagaaacggtaccgtttgttgaatacggtttatcaaaagttgttggcgtttcaattcttttgattggaacaggtacgctctcaggtattattaaagcatctaatctacaatttgatatgattcatctccttgaatttttaaatatgccgacctttatccttgccccactctcaggtatttttatgggagcagcaacagcatcaacgacttctggaacaactattgcttcacaaacgtttgctgaaaccttgattaaatcaggggtaccggcggtttcgggtgcagctatgattcacgcaggtgcgactgttttggattcgctacctcatggatccttcttccatgcgacaggcggagctgtcaatatggctataaaagatcgtatgaaactaattagctatgaagctttgattggattaactagcacaatagttgctgtcgtttactattgtttctttgggtaaaatttggatgaatacgtgatgtttattatcactgtttgaatagaattctcattgattttttctaattttcttactataataaattagtaggagaggtgttgtgaaacaaacaaagaaagaatttattttaggattaaccattattattacccttactttattaatcatgctgatttttttagtaatgtttaataagtccagtaactctaagttgaagcagacaaaagatagaagaatatcatctacttcaaccacaaggacatccagtagctcacatgatcaaaaaattgtagaaaagtctcttgaaaaaaagaaaatggtcatggaacaagatatggaattgatgaatgcctataggctctattatgattatgcccatttgtccttgaaagaggttgttctggcctatatgtctgaatatggcattgaaaaaaatagtgttgctttttcttataaaaatttaaaaacaggacaaagggacgctatgaatgatactcaggctatgacagcagggagcacctataagttacctcttaacatgttggtagtagatgcagtggtcaagggcaagttgtccatggaagaacgctttgatattaccgagactgactatgaatatattggtgaacataataattatgttgctgctttctcgggggcaatgtctattgatgatatgcaaaaatactctttagtttattcagaaaatacacccgcctatgctttagctgagcgtattggtggcatggatagtgcttattcaaagtttggtcgttatggccaatctaaaggagacatcaaaaatatacaaaaaaacggtaataaagtgacaacagattactatattcaagtgctagactatctctggaaacatcgtaaaaagtatgatagtttaattacttatttagaagaagcttttccaacagattattatcgtgctttgataccatctgatgttgttgttgctcaaaagccagggtatgtccgtgaggcgttgaatgttggagcaattgtcaaagaagaagtgccttatattgttgctatttatactgcaggtttaggtggctctactcaggaagattcagaaattaatggagtgggactatatcagctagaacaattatgttttgttattaatcaatggcatcgtgttaatatgaattagaaataaatctatcaaaataataaaaacctcttagattaactatctaagaggtttttataaatgtgattttataacttggttaagtgaagaaagggcagaaacagttttttgataagattcaggactaatttctgagaaaaaatacccgcacgattgcaccgcattgacaacggcatcttgtgactcaatacctttgttacttagatgaataatgagttgccttttatcatctcttggtttttctcgtacaatccacccacgattttccatacgctttaaaactggagttagggtattcgaattaagagatagtgcataactaagttccttcatatgccgatgatcctcttcccaaaggactaacaagataacgtattggagataagtcaattgaaattcatccaaagctttttggtaaaatttattgaaaagtcgatgtgtttcactaaccgtaaaacataatcgctcgtctaaaatacttcgattactcattatcatattgtagcattttggaggcgttatagtatgtcaatcgtgttaaaaaatgataaaactttttcctaattgaaagcctattcttacttaacaaacatagcatcaccaaagctgaagaaacgatatcgttcttcaactgcatggttgtaagcttctagtacaaaatcacgtccagcaaatgctgatactaacatgacaagagtagactttggtaagtgaaagttggttgaaaaagcgtctacaaccttgaactgataaccaggcttgataaaaatatttgtccaccctgagtcggcttttaattcaccattgaatttagaaccgattgtctctaatgtgcgaatagaagttgtaccaacagctacaatacgtccaccagattctttaactgcattgagagtatcagcagcttctttagataattggtaaaactcagaatgcatttcgtgttcatcaagattatcaactgaaacaggacggaaagttccaagtccaacgtgaagcgtcaaatagacaagcttcacaccttttgtttcaattttttccaatagttcttttgtaaaatggagaccggctgttggtgcagcagcagaaccattttcttttgcatacacagtctgatagcggtcacgatcttctagtttttcatgaatatatggcggaagtggcatttcgcccaaactttcaaggacttctagaaaaataccatcatatgagaattctacaatacgcccaccatgttctaattcctttgtgactgttgctattaaccgaccatcaccaaatgaaactttggtccctactcgtaagcgtttagcgggtttagcaagcacttcccattgatcgccttctgtatttttgagaagtaataactctacatggccgtgtgtatcttgcttttcaccataaaggcgagcgggcagaacacgtgtgttattcattactaaagcatcaccaggcttgagttcatctaagatatgatcgaaatggctatctgtcatcgtcttattcttatgatcaatgactaataatttagaagcgtctcttttttcaagtggtgtttgggcaatgagttcttctggtaaataaaaatcaaaatcgtttgtattcatgatttctcctatctataagtaagcttttctattatatcacgttcagtaaaaatgacccaactaatctttttatttagaatgattataaaaaataattgtaatcattctaaataagtgatataataattgtcagaaagtgagaagtagagaagatgaaagaagcaaaaaatttttcccaacaattgaatattttaagagctggtgttcttggtgctaatgatggtatcatctctgtagctggtgttgttattggtgttgcgagtgcaactcataacctttggattatttttttatcagcagcttccgcgattttagctggtgcattttctatggctggcggggagtatgttagtgtttctactcaaaaagatactgaacaagcagcagttgcgcgtgaagagaaactactagaaaataatccagaacttgccaaaaaatccttagttgatatctacttagcaaaaggagaaagtcacgaacatgctcaatggctagttgacaaggctttttcaaagaatgctattgagcatttagttgaagaaaaatatggtattgagttcggtgaatatacaagcccctggcatgctgctatatctagttttatagcttttgccatcggatcaatttttccaactataactattctgttattgccattttcggtacgaattgtaggaacggtaataattgttattgtttcactattatcaactggttatgtaagtgctaagttaggtcaagctcctacagtacctgccatgcgtcgaaatgtgatgattggttgtttgacaatgttggcaacctacgtcattggacaattattttcaatataaaatattaatcgtggagttattgtctaaactagaatggacagtaattctttttagttttataacgaaattaagaagtttttattgacaaaaattggtatataccatataatataatcataaaggtctataccaaataaaaggagagtaaacatgagagttattacagttaagaacgacattgaggggggaaaaattgcatttactcttttagaagagaaaatgaaagctggtgctcaaactttaggattggcaacaggaagtagcccaatcaccttttacgaagagattgtaaaaagtaatcttgatttttcaaatatggtttctattaaccttgatgaatatgttggaattgccgcaagtaatgatcaaagttactcttattttatgcataaacatctttttgatgctaaacctttcaaggaaaataaccttccaaacggcttggctaaagatttgaaagaagaaataaaacgatacgatgctgtcataaatgctaatccaattgattttcaaatccttggaattggtcgtaacggtcatattggttttaatgaaccaggtacaccttttgatattacaacacatgtggttgatttagctccaagtacaattgaagctaatagtcgtttctttaatagtattgatgatgtaccaaagcaagccttatcaatgggtataggctctattatgaaatcaaaaacaatcgtattagtggcgtatggtattgaaaaagcagaagcgattgcaagtatgattaaaggacctatcacagaagatatgccagcaagtatcctccaaaaacatgatgatgttgtgattattgtggatgaagcagcggcatcaaagttgtaaagtaaataataaaaaagtaaggatgaatctcaatgagaaaaaattcattcttacttttttattatgctttattaaattgtccagtctaagttaggtccagctggaataataccagtagggttaatggttttatggctaccgtaatagtgttttttgatatgatcaaaattaactgtctcagcaattccaggtaggttgtaaatacgttttgtataatgccataaatgtgggtaatcatgtagcgcttttaaattacatttaaaatgaccataataaacggtgtcaaagcgaactaaagttgtgaaaaggcgaatatcagcttcggtaaattgttctccaacaagataatggttatcagataagtgtttttctaactgatctaaagctgtgaataaggtttcaacttccttttgataaacgttctgagaagtggcaaaaccagctttatagacaccattatttatttttggataaataaaattattcatttcgtcaatttgtccttgtaaggaatcgggatagtaatcgtcagtatttccagtaatatgattaaatgcagtatttaacatacgcataatttcagatgattcattgttaacgattgtatggaattttttatcccaaagaacagggactgtcacgcgtcctgtataatcactttgacttgcttgatagatttggtaaaggtattggctttggttaatcatatcaggaataacgcctttatattcttgaaaagtccaaccattctccaacattaaagggttaacaatggagatagagatatgagattctagatttttaagctttctcatgattaatacacgtgatgcccaagggcaagctagtgaaacgtagagatgatatcgtccagattctgctttaaaacctgcatccccactaggccctgctgaaccatctttagtaacccaatgacggaattgtgtaacggttcggacgaatttaccaccagttgatgcagtatcataccattgatcaacccatttgccatctactaaaagtcccatgataatctcctttgtttttctattactaattagtagtataaagattttaaaaagaattagcaaatgtttaacttacagtatggtaaactaagggtatgcgtttagataaattattaggtcaggcaggatttgggtctagaaatcaggttaagaaattaatttgttctaggcaagtttctgtagatggtcaaattgttacaaaggataatgttattgtagatagtggtctacaatcgatttttgtaggaaaagagagggtctgcctaaaagaaagttcttattaccttctttataagccatcaggagttgtttcagcagttagagattcagaacataaaacagtcatagacttaattagcgaaaaagataaggtggagggattgtatccgattggtcgtctagatcgtgatacggaagggcttttaatagtcacgaataatggtccactgggttaccgaatgttacatccaaaacaccacgttgcaaaaacatattatgttgaagtaaatggtttcttggaaagagatgctattaccttttttgaagaaggagttgtatttgacgatggaacaaagtgtaaaccagctgaattaacgattgatacggctaataatgacaaaagtaccgcaagaataactatcacagaagggaaatttcaccaagtaaaaaagatgtttcttgcatatggcgttaaagttatatacttgaggcgtatttcttttggtgacttgaggcttgatatgaatttgaaaccaggtcagtatcgtagattgagagattcagaggcagctatcttaaaaaggtatttagattagtgaaacgactcacttgaccttgcttagtattcttcatatacttataagtgattattttaaaggagaaaaccattgaattcaaaactttcattgaaattgactattttatcgatttctatctttttgatgtctcatttagcaattgctcctgcaattcctaaattgtatgccttttaccatactcaaaaccctcatattggactagcttcagtagagagtttagttactattccagctatgatgattactatttttgttattttgagtaattttgtagtcacaaaacttggcaaaaaaaacacggtcttacttggtttatgtttaatcttaatgtctgggtttatctcattttttacaagtaatttttcacttgcgatggctagtcgactacttttgggtattggtattggtctctataattcgctatcaattagtatcataacggatttatatgaggctgatgagagagccagtatgattggtcttagaacagcatcactcaatatcggtaaagccttaactacatttattgttggattggttttagctattggtgtgaattatatttatttggtttaccttctggttattcctgttttctttttcttttggaaaaatgttccagaggttgaaaatcaaacacatacccttaaagctagtacaacatttgatactaaagcggctttgttgatgctcatcacgttcttagtaggtattgcttatataggagcaactgtcaaaattccaaccttactagtgacaaaatatcactacgcgacgagcttctctagtaatatgttaactctccttgcttttagtggtattttagttggatctgtatttggaaaattagttaaagtattccaagagaagacgctattaatcatgattctagctatgggaataggtaatgtgctatttgctttagctaataatcagatcatttttatcgtagctagtattttaataggagctagttttgttggcaccatgtcttctgtattcttttatatttcaaaaaactatgcaaaagaacataataactttatcacaagccttgccttaacagctggtaatataggagttattttgacaccgcttattttaacgaaacttccaagccagctacatctggaaccttttatgacaccatttttaataacaagtgggctgatggtgattaatgtctttgtttacctagttttaatgtcaaaaaataaataaaaagttatccgaaaggataacttttttcgaatagtaaaagtaggagaaaaaatgttaattgctaaagacaaacaaggaaatttaattaatctactcgagtctcatccgggaaagggacagtatttttgtccaacttgttgttcagctgtaaggttaaaggcaggtcgaatcatgagaagacactttgcacatattagtctaaaaaattgtcagttttatcatgaaaatgagtctaatgagcacttgcaattaaaagcaaagttatatatgagtttaagtagagagaatgaaactatgctcgagcatcatttgccagaaattaatcagattgcagatttatttgtgaatgagacattggctttagaagttcagtgtagccgactatcagagcagcgactcagggagcgaacaaaagcatatctacaggcagactttcaagtgagatggttactaggggaaaaactctggttaaagcatcgtttaacaaatctacataaacaatttttacaattttctcaaagtatcggatttcatatttgggagttagatttgaggttagaagtactgagactaaaatatttgatttacgaagatttacgcggacatgtctattacttaagtaaaacttgccctcttagtggagacgttctagcatttttgaagtggccataccaatcaaaaaatctaaatttttataaggttaaacaagacagaaatatcagagattatgtgcgtcagcagttacgctatggcaatcaattttggttacgaaaacaagaaaaggcctacctttctggtcagaatctattgacccaagagctaatgatgttttttcctcaaatacagccaccacgtgtagatactgatttttgtcaaataacaaattctctaacatcgttttatcagaattttacaaattattatcaaaaaaataagaataacttagaccaaacactttatccccctgtattttatgataaaatagtcactaagaattaaactggaggatacaaaatgtcagacaatcgctcacatattgaagaaaaataccaatgggatttaactactgtctttgcgactgatgagttatgggaaactgaagtggtagagcttactcaagccatcgataatgcaaagggtttttcaggtcatctgttggactcaagccaatctttattggagatcacggaggttgaattagatttatctcgccgtttagaaaaagtttatgtctatgcttcaatgaaaaatgaccaagacaccactgttgcgaaatatcaagaatttcaagcgaaagcgacagcgctctatgcaaaatttagtgaaacattttcgttttacgagccagaactattgcaactttcagagtctgattaccagtcattccttttagaaatgcctgacttgcaaaaatatgatcatttctttgagaaaatatttgcaaataaacctcatgtcttatctcaaaacgaagaagaattgttagctggtgctagtgagatttttggagcagctggtgagacatttgaaatccttgataatgcagatatggtcttcccagttgtaaaaaatgcaaaaggtgaggaagttgagcttacacatggtaatttcatttcccttatggaatctagcgataggacggttcgaaaagaagcatatcaagctatgtatagcacatatgaacaattccagcatacttacgctaaaacattacaaacaaatgtgaaatctcaaaattttaaggctcgtgtgcatcattatcaatcagcacgccaatcagctctatctgccaattttattccagaagaggtctacgaaactctaattaagacagttaatcatcatttaccgctcttacatcgttatatgaagttgcgtcaaaaagttcttgggctagatgatttgaagatgtatgacgtatatacacccctttctcaaatggatatgagttttacttatgatgaagctctaaaaaaatcagaggaggttctagctatttttggcgaagcatattctgaacgtgttcatcgtgcttttactgaacgttggattgatgtccatgttaacaaaggaaagaggtcaggcgcttattcaggtggatcttatgacactaatgctttcatgcttcttaactggcaagatactttagataatctttatacgctggtgcatgaaactggacatagtctacactcgacgtttactcgtgaaaatcaaccctatgtttatggtgattattctattttcctagctgaaattgcatcaacaacaaatgaaaatatattaacagaaacccttttgaaagaagttaaagatgataaaaatcgctttgcaattctcaatcattatttggacggtttcaaaggaacaatttttaggcaaacacagttcgctgaattcgaacatgccattcatgtagctgatcaggaggggcaagtactaactagcgaatacttaaacaatctttacgctgagcttaatgaaaaatattatggtttgactaaagaagataatcattttattcaatatgaatgggcaagaattccacacttttactacaattattatgttttccaatatgcaaccggcttcgcagcagcaaattatttagcagagcgtattgtaaacggtaatccggaggataaagaggcctacctaaattaccttaaagctgggaattcagattaccctctaaacgtcattgctaaagctggtgttgatatgactagtgcagactatctggatgcagcttttagagtatttgaagagcgtttagtggaactggaaaatcttgtagcaaaaggcgtccataatgattaagttgaaaatatagctattgaagtaaaaccagtcaactagactggtttttgatagtgatcagttattttatagtttgttttgagagtggttttggtaaagttagttagtggaaaactcaataggtggaaatacctacccaagttatgatttttatgagaccaaaactgctattgtcaaaaaagaagggaaataggatgaagaagcttacttttatttgggatttagatgggacattaatagattcgtatgtaccaattatggaagctcttgaagaaacctatcgtcattttggtttaatatttgataaagaattaatccatgaatatattttacaggaatcagtggggaaattattggtaaacctttcagaggaagagcaaatacctcatgaaaaactgaaagcatattttacaaaagaacaagaaagtcgagattctaaaatacatttaatgccatatgcaaaagagattttagaatggaccaaagaacaagatatccccaattttatgtatacacataaaggagcaagtacgcattcagtgttggaaaccttgcagatctctcattattttgatgaaattttaactggtgtttcgggattcgagcgaaaaccacatccacaagggattaattatttagttaaacgatattctttagataaatcaatgacttattacataggagatcgtccactagatttggaggttgctcaaaatgctggtataaaatccataaacttaaggttagagaattccaaagaaaactataatatttcaagtctcaaagatataatatcacttgatttcactcgtttggattaaatcattctcagagttagacattttttgctataataaaaaagttattatttaaaatagaaaagaggagccaaaagtggttcaatcttacagtaaaaatgctaatcataatatgcgtcgtccagtagttaaagaagaaattgttcaatatatgcgtcagcaccaaaaacaaaataatggctgtttagcagagttagaagcatttgctaaacaggaaaatatccctattatacctcatgaaacagcgacttattttcgttttttgatgcaaacattacaacctaagcacattttagaaattggaacagctattggtttttcggcccttttgatggcagaaaacgctcctgaagcaaagataacaacgatcgatcgtaatgaagagatgattgccttggctaaggaaaactttgcaaaatatgataatcacaatcagataacccttttggaaggcgatgctgtggatgtgttacaaacattggataaatcttacgattttgtattcatggattctgctaagtctaaatatatcgtttttttacctcaagtattaaaacatttagatgttggaggagtagttgttttagatgatattttccaaggtggagatattgcaaaacctatcgatgaagtgagaagaggtcagcgaactatctaccgaggtctgcaacgtttatttgactcgactttgcaacatcctgatttaactgctactttggtacctttgggagatggtttattgatgattcgtaaaaatgcagatcatattgtactagaagattaaggcatttttaagaaattatgatataataatggagttaatgacaaaaaggagttataaatcatgaaaacaagatcaaaacttgcagcaggctttttgacacttatgtcagttgccacattagctgcctgctcaggtaaaacatcaaatggaacaaatgttgttacaatgaagggcgacactattacagtctctgatttttatgatcaagtaaaaacatcaaaagctgcacaacaatcaatgcttacattgatcctctcacgtgtttttgatacacagtatggtgataaagtttcagataaaaaagtatcagaagcttataataagacagctaaaggctatggtaattcattttcaagcgcactttcacaagcaggtttgactccggaaggttacaaacaacaaattcgcacaactatgcttgtggaatatgctgtaaaagaagcagctaagaaagaattaacagaagcaaactataaagaagcatataaaaactatactcctgaaacttctgtacaagtaatcaaattggatgcagaagataaagctaaatctgtccttaaagatgtaaaggctgatggagctgattttgcaaagattgcaaaagaaaaaacaacagctactgataagaaagttgagtataaatttgattctgcagggacaaccctccctaaagaagttatgtcagcagcctttaagctagataaaaatggtgtttcagatgtggtttcaacggttgattcaacaacttataaaacaagttactacatcattaaagtaactgataagacagagaaaaaatctgattggaaatcttacaaaaatcgcttaaaagaagttattcttaaggataaaacaagcgatagagccttccaaaataaagtgatttcaaaagccttagaaaaagctaatgttaagattaaagataaagcatttgcaggcatcttatcacaatatgctacaacaagtggttcatcatcacttaaaaaatagttgaccaagtcttaaaaagactgtataattaatactattgagaatgaaatttcaacgattagatacagaaaagtgacggttgctgcgagtcatggataatcagaaaaagatgctactcaatggggtaaaactaaaaataaatgagaatgacaagttcattgaatgaaggtggtaccgcggttttcgcccttcgtaatggacttgtcttttgctatttgtcaactttcgaggaggaagagatatggctacttttcaaattaaagaaaaaatgttttctctaggcggtaaatttactattacagacctgactgggcttccctgttatcacgttgaaggaagtttgttccctctacctaagacttttaaagtctttgacgaagaggaacatctcattagtcagattgagaagaaggttttaagttttttaccaaagtttaatgtgacattagccaatgggaatcatttcacgattaagaaagatttctcatttttgaaacctcattacaccattgaagaccttgatatggaagttaagggaaatttttgggatatggatttccaactcttaaaagacaatcaagttatagcaaacatatctcaacagtggtttcgtatgacttcaacttatcaggtagaagtttacagtgaaacttacaacgatttgacaatttcgcttgtcatagcgatcgactatgtcaaagagttagaaaaaaatgcatcaaactaattttaggagagaataatgaaagaattatcgtctgcacaaatccgccaaatgtggttggatttctggaaatccaaaggacattccgttgagccttcagctaacttggttcctgttaatgacccaacgcttctttggatcaactcaggtgttgcaaccttgaaaaaatattttgatggttcagtgattccagaaaatccacgtattaccaatgcacaaaaatcaattcgtactaatgatattgaaaatgttggtaaaacagcacgtcaccatactatgtttgaaatgcttggtaacttctcaattggagactatttccgtgatgaagctattgagtggggatttgaactcttgacaagtcctgaatggtttgacttccctaaagacaagctctacatgacttattacccagatgacaaggattcatataaccgttggattgcttgtggcgttgaaccaagtcacttggtgccaatcgaggataacttctgggaaatcggtgctggtccttcaggtccagatactgagattttcttcgaccgtggtgaagattttgatccagaaaatattggacttcgtcttttggctgaagatatcgaaaacgatcgttacatcgaaatctggaacattgttctctcacaattcaatgctgacccagccgtaccacgttcagaatacaaagaattgccaaacaaaaacattgatacgggtgcgggtcttgaacgtcttgcagctgttatgcaaggggcaaaaacaaactttgaaactgaccttttcatgcctatcatccgtgaagtagagaaattgtcaggtaaaacttacgatccagatggcgacaacatgagcttcaaggttatcgctgatcacatccgtgcgctttcatttgccatcggtgatggtgcgcttcctggaaatgaaggtcgtggttatgttcttcgtcgtcttctccgtcgtgcggttatgcacggtcgccgtcttggcatcaacgaaactttcctttacaaattggttccgactgttggacaaatcatggaaagctactatccagaagtgcttgaaaaacgtgattttattgagaaaatcgttaaacgtgaggaagaaacatttgctcgtactatcgatgctggtagcggtcacttagattcattgcttgcgcagcttaaggctgaaggtaaagacacacttgaaggtaaagatatcttcaaactttatgatacttatggattcccagttgaattgacagaggaattggcagaagatgcaggctataagattgaccacgaaggctttaagtcagccatgaaagaacaacaagaccgtgcgcgtgcagctgttgttaagggtggttcgatggggatgcaaaatgaaaccctagctggtattgttgaagaatcacgattcgaatacgacacatatagtcttgaatcaagtctttcagtcatcatcgctgacaatgaacgtactgaagcagtttcagaaggtcaagctcttcttgtctttgctcaaacaccattctatgctgaaatgggtggacaggttgctgaccacggtgtcatcaaaaatgataagggtgacacagttgctgaggttgttgatgttcaaaaagcaccaaatggtcaacctctacacactgtaaacgttttggcatcactttcagttggaacaaactacacacttgaaatcaacaaagagcgtcgtttggctgttgagaaaaaccacacagcaactcacttgctccatgcagctcttcacaatgttatcggtgaacacgcaactcaggctggttcattgaacgaagaagaattcttgcgctttgattttactcactttgaagcagtaagcaatgaggaacttcgtcacattgaacaagaagttaatgagcaaatttggaacgatcttacgatcacaacgactgaaactgacgttgaaaccgcaaaagagatgggagcaatggcactttttggtgagaaatatggtaaagtggttcgtgtggttcaaattggtaattattctgttgaactttgcggtggaactcacttaaataattcttcagaaatcggtctcttcaagattgtcaaagaagaaggtattggttcaggtactcgtcgtattattgcagttactggtagacaagcttttgaagcttatcgtaaccaagaggatgcactaaaagagatcgctgctactgtaaaagctccgcaattgaaagatgcagcagctaaagtacaagctcttagcgactcacttcgtgatcttcaaaaagaaaatgtagagcttaaagaaaaagcagcagctgcagcagctggtgatgtctttaaagatattcaagaagctaagggcgtgcgcttcattgctagtcaagttgatgttgcagacgcaggtgcacttcgtacatttgctgataactggaaacaaaaagactactctgatgtgcttgttctcgtagcagctattggtgagaaggttaatgtccttgttgcaagcaaaactaaagatgtccacgctggtaacatgatcaaaggattggcaccaattgtagcaggtcgtggtggtggtaaaccagacatggctatggcaggtggtagcgatgcaagtaaaattgcagagttgctagcagcagttgcagaaaatttataagaaacacctctcatttagttagtaaataaaacagacaaagggcagaacatcgttctgttcctttgtgtatataggagaaatatggttggtttaggaacagttatcaatgttattcttattatagttggaggctttgtaggtttatttttgaaaaattttttgaaagaatcacttcaaaagagccttatgcaagccatgggagttgcagttttatttatttcgatatcaggtgttttggagaaaatgatgttagtcgaaaagtcacatctcatctctaatcatacaaatatgatgattattactcttgctctaggtacggtacttggagagttgctatcactagattcgtatattgataaatttgggaactatcttaagcaaaaaacaggaagtggtaacgatattaaatttgtggaggcattcgtcacctcaacttgtaccgtttgtattggagcaatggccgttgttggtagcattcaagatggtatagcagcagatcattcgattttatttgctaagggaatgttagacatgattattattgcaattatgacagtgtctttagggaaaggagctctattttctgcacttcctgtcgctttactacaaggtagccttacgattgttgcttttttcatggggagtctacttaatccatcatctttagattaccttaacttagtaggaaatatgcttatattctgtgtcggtgttaatttactctttaacctaaatattaaagttatcaatatgttgccagcaattattttagctatattatggggaagttttatataaaagataaccaagttttaactcaaacttggtttttctttagacatatgttaggatgaaagaagatatactacggagaggatccaactcatgaatctattattttctattgatgatatgtacgtagatcattttaaagtgatgctttattcgcttgtccgacaaaccaagaatcgtaagttagagatatatgtcttacaaaaaacattactcaaacgtcatacagaacttattcaatatactcaaaatttagaagttggctatcatccaataattgtaggtaccgaagtatttgctcaggcacctacaactgatcgctatccagatacaatatattatcgacttttggctcataaatttttacctgagaccttagataggatactttatttagatgcagatatgctttgcttaaatgatttctcaagtttatatgatatggagttaggtgatcaactatatgcagcggcaagtcataatactgatggtaagtttctagattatgtcaataaattacggttaaaaaatgtagagctagaatcctcttatttcaatacaggggtactcttgatgaacttgcctgctatacgaaaagttgttcatcaacaaactatcttagattacataatgcaaaaccgtggtcgtctaatcttaccagatcaggatatcttaaatggcttatacgctaatttggttaaaccaatacctgatgaaatttataattatgatgctaggtatagtcttatttatcaattaaaaagtcgcaatgaatgggatttagagtgggttattaaccatactgtttttttacattttgcaggacgagataaaccatggaaaaaagattatagaggacgttactcgggcctttataagtttatggctaaagaggctttaactaaaaattgaagatttaaaaggttactaaattatttctatttagtaactttttttggggtgatattttaatgatatcaataatctttgctaataattatttataaaaaagaaaaataatatcaaaggaggagcgtgttaaaatcacttaatcattgaacaatcaaattaatcattgtttcaaaagcataatggttttaggagttactcaaatgaaaaaggaatttattattacaggtcggatggttgcaagagttatggaaaccctagtttgcttatgtatggtaagtaatcttgttcttgatatgcttgatataatagaaataaatgaaattgtattttgtgtgttggtagcatcaattgcagggcttgagttttgtttgcaaaaagaaagggagtagatagatggaattgtttggcttaatggctttttatggtcatgacgtatattggtgtacctaaagagcaaaaggcactcagtcgtaggggtaaacaattagaaaaaataaatcagggaggaaaaacacttatgtcacaaatgattcaagatttagtaggaagcacatgtatgatttatttagaggatggttctcaaactcatccttatgagattttaaaggtagatgaggattgggtacagattcgtcgcaacttgaaacgaagtaaagaggaggtgcgtattgtccgtattcatgatatcaaggaattgcgtccagtcaataaatagagcgaggaataaatctatatatcattttataaaggagaaaaatgatgggattaattttaaaaaatagactcaaagaattgcgtgcacgagatggtatcaatcaaacagaactcgctaaattaacaggagtctcaagacaaacaattagcctaattgaacgcggagaatatacgccatctgttattattgctatgaagatttctcaagtatttaaagaatccctagagaatgtttttagtttagtgtcaatggaggaataatgatgaaaaattttataaaacaaagtgatactacatttgttcgaattatcaaaagtcttttaattggtggttttataggggccatacttggttccgtaggagctctttttatcatatttggtcaagataagtacttatctgaaattaatattgttcaatatttcctatgggttagtcgtattgttgtaattataacagctctctttagtctcatctacctctatcagattcaaaaatatcagaaagtttttttcaatgttgatgaaagtcaatctgaagaaatttatcgccagattaatttaagacattcttatgggatgacttttgtgtcaatttcaatagtactcagtatagttaatactttatttaactataaactaaatatttttgatgattcagttactttagttattccaatatatgatttatcactgctatttgttttattgggtttacatatatattttttaaaggtatatcggaatatccgaggtataaaaatgacagtcgctccaactttaaaagagttgaaaaacaatgtcttacaattggacgaagcagagttggaatcaaattataagatgtgttttgatattgtcatgaatttaagtggttttattttccctacgatctattttgtattattctttatctcatttgtttttcaaaaagtggagattgtagcaattattataacaacatctattcatatctacattctcattaagtctttaaaagcagcacgtcatttttatagatagtagtagctagattttttatcaaaaaacttatattagtgtaaaataaaaggattgattctctgaaaatcagtccttttattttttctatttcttaggtaaaaagaagctagggtagctgataactaaaataataatactaatgactacaaaaaatagagttaacaaaccagcagtaccattgacgcttaatgagtataatgtagcagacataccttttggtgcataactagcccaaaaaataacaccagcgatataatgccaaacataacgaacaagtgttgctaatattgctccagataatgctaatgataaagctttagttttagagctgctgctaagtgcatctttaaatttagcagaaaatacgcctgcaagtcccatacttataaatgctaagatgtattctataaaaacttgggataaactaaggtaatatactttggaaagaacaaagtgcaataagccccaaattaagccagcaaatagaccgtattttgtaccacgacgtaatgcaaaaagtatcagaggaattgctccaaaagagggagtgaaccatgacgcaaaatcaggaatcattgataaagccatagcaagcgctgcaaaaatagcagtttcaataagacaggtagtgttgttattttttgacataaaaaatctcctttttttatacagcaaaggagattcttttgtcatttgtcatgtttaaccaattcaaaccacaattcctacgctcgtcctaacgagatcaggttagaggattttgcatatctgcaatctcagctcaaggcactcccttgtgtatttactctaacattctatcttgaaagggtttgcttgtcaagaaatttgtatttaactagaaaaagacactaaatcagtgtctttttcttataatccatagttatagtcatcatcatgcatagcttcaacgctaccaagtaggtaaccattacctacttgagagaagaagtcatggtttgatgttcctgttgaaataccattcataacaattgggttgacatcatttgctgtatctgggaataaaggatcttgtcctaaattcataagagctttattagcattgtagcgtaaaaaggtcataacttcttcagtccatcctacgccatcataaagtgtcttggtgtatttttcttcgttttcatacagctgataaaggaggtcatacatccaatcacgaaaattctcttgctcatcttctggtaattcgttaaaaccaagctggaatttgtaaccgatataagtaccatgtacagattcatcacgaataattaatttaatgatttcagcaacatttgctaacttattatttcccaaatagtaaagaggtgtgaaaaagccagaataaaaaaggaaagtttcgaggtaggtggaagccacctttttttgaagggcatttccattagcataaatgtcattgataatacgtgctttttcttgaaggaactcattattattagtccactcgaaaatttcttcaatttctgatttagtatttaaagttgagaaaattgaagaataagatttagcgtgaacagattccatgaattgaatattgtttaagacagcttcttcgtgaggcgtgcgaacatcggcacgaatagcttcaacaccagtttctgattgcatggtatcaagtagggttaagcctccaaaaaccttgccaacaagatctttttcttgagcagaaagtttgcgccaatcgtctaagtcatttgataaagggatacgtgtatcgagccaaaattgttcggttagtttttcccaagttgatttatcaataacatcttcaatttcgttccagtttatagcttcgtagtaagttgtcatggttttctccaatggtaaataggtttttatataatgatgatggaagaagagtagaatatagaattctgatctagcaatatttcaagtattatcgatttttagaaaaataaagatgaaaataccttagaaaataagataacatcatgaaactgagatagtttatctcagtctagtttctgatgttttaagtagagtttcttcgttagatgacacaactttcgcattgattagctccgacttcgctaccatcatctgtaaaagtacggatatagtagattgatttcacacctttgttgaaagcatagttgcgtaggattgaaaggtcgcgagtagtctgcttactttctgttttccactcgtacaactcctttggtaattcgcttcgtaaaaagagtgtcattgagagaccttggtctacgtgctcagttgctgcggcatagacgtctattactttacgcatatccatatcataggcagaagtgtaataagggatagtatctgtagctaagccattagctggataataaattttcccgatttttttctcttgacgctcttcaatacgttgtgtaatagggtggatagatgctgaacaatcgttgatatacgaaatagaaccattcggagcaactgcaagccgattttgatgatatagtccgtctttcataactgcgtatctaaggttttcccaatctttagcttcggggataaaatgattagcaaatagggattttactttgtcagattgtggaacaaattttccagatacatatttatcaaagtatgtaccgtcagcgtattttgatttttcaaaacctacaaatgttgtttgacgttcgcgggcaatattgtttgattctactaaggtccagtagttcattagcatgaaataaatatcagtaaattcaattgattctggactaccatattcgatatgattttttgccaaataggagtggagtcccattgctccaagtccaaatgtatgtgcttgagcatttccgtttttaatagttggaacagcttcaatatttgatgagtcagtaacgaaagttaaagcacgagtcattgttttaattgattttccaaaatcaggagatgtcatcatatttaaaacattagttgagccaaggttacaagaaatatcagttcccatttcaaggtattcttgagcatcattgataagacttggtttttgtacttgcaaaatctcagagcaaagatttgacatgataatttttccatcaacagggttagtacgattagcagtgtcaatattgatgatgtaaggataacctgattcttgttgaagtttagaaatctctgtttctaaatcacgagcattgatttttgttttagtgatattagggttagcgactaattcatcgtatttttcggtaatatcaatatagctgaaaggaacaccatattcacgttcgatactataaggactaaacaagtacatttcttgattgttacgtgctagttcatagaatttatcgggtacagtaatccctaatgacaatgttttaacacgtactttttcatcagcattttcttttttagttgataagaatgaaataatatctggatggaaaacgtcaaggtaaacaactccagcaccttggcgttgtccaagttggttggagtaagaaaaactgtcttcaaataatttcatgactggaacgactccagaagcagcaccagcaaaacctttgataggagctccagcctcacgaaggttactaagtgatattccaaccccaccaccaatacgagataattgaagagctgaattaatcgaacgaccaatagcattcatatcatcagttacttggattaagaaacatgagactaattctccgcgacgacttcgaccagcatttaaaaaacttggtgttgcaggttgatagcgttgtgaaatcatttctagagctaagtcagttgctagttcttcatcaccgtctgcaaaataaagagcgttaaagagaacgcgatcttcaatactttctaaatagtattctccatcatttgtttttaatgcatactgctgataaaacttataggctgccatgaaggatttaaaacgaaactttttatcgaagagtttggtagataattcttcaataaattcaggacgatatttattgaggaaagcttcttcaagataatcatacttaaggaggtaagcaattttatcagtgattgagtcaaaagcttttgaattaggctgtacgttttctttgaaaaaagcagttaaggcttctttatctttatggagtgggatttgtccattaacaggacggttaatttcattatttaggcgaaagtaagatacatcgccaatattttttaaactcattgaatttatcctcttaacttaacaatacaaaatgggaataaagcaattaattgctttattcccagactctaatttgcttaaacaagttcttttagtttgcttggttggaaacctgaaaaaacaacattaccagcttcaatcactggagccgcagaaaagccgagatttttcacatattcaattttttctggtttttcatcaatattaatttcttcaaaatcagcgccgtgctggtcaagaaatttcttagtcattttacattgcatacagttgtttttcgaaaaaacagtaatagctgccatgttgtcctcctaatttttttcatggtaatagcatataaaaaaagaatggaaaaagcaagtgttttatttctaacaaaacacaatatatagtgtcttaaaataaaatgagacactatatttcgttttttagggttagtttaaaagctttcagcctgttttccaattcctttcagaagaacataaaaaaatcatttttagaattctatttttaaattctaagactctcatttttaatatgaaaagctgtggaaaacattcaagtttttttctgtttgagacatttaatcttgaaaaataaaaagcaatatgttatacttttaacttgtaagggttaccaataggtgactcaaatatttacaaatgacaaaaggagaaccataatatggcttcaaaagatttccacattgttgcagaaacaggtattcacgcacgtccagctactttgcttgtccaaacagctagcaaatttgcttcagacatcacgcttgattacaaaggtaaagcagtaaaccttaaatcaatcatgggtgttatgagtcttggtgttggtcaaggtgctgatgttactatttcagcagaaggtgcagatgcagatgatgcaattgcagctatcgaagaaacaatgacaaaagaaggattggcataagaaaatgacagaaatgcttaaaggaatcgcagcctctgatggtgttgcagttgctaaagcatatctacttgtccaaccggatttgtcatttgagactgtaacagtcgaagatacaaacgcagaagaagctcgccttgatgttgcactccaagcttcacaagacgagctttctgttatccgtgagaaggcagtagaaagcttaggcgaagaagccgcagctgtatttgatgctcatttaatggttctttctgacccagaaatgattaatcaaattaaagagactattcgtgcaaaacaagtaaatgcagaaacaggtcttaaagaagtgactgatatgttcatcactatctttgaaggtatggaagataacccatacatgcaagaacgtgcagcagatatccgtgatgttgccaaacgtgtcttagcacatcttttgggtgttaaattaccaaacccagcaactatcaatgaagaatcaatcgttattgcacacgatttgacaccttctgatacagctcaattaaataaacaatttgttaaagcttttgtaacaaatattggagggcgtacaagtcactcagctattatggcacgtacactcgaaatcgcagctgttcttggtacaaatgatattactgaacgtgttcaagatggtcagttgattgctgttaatggtattactggtgaagttatcattgaaccaactgaagctcaaatttcagccttcaaggcagcaggtgaagcttatgccaaacaaaaagctgaatgggcacttcttaaggatgcacaaacagttactgctgatggtaaacattttgaattagctgctaatatcggtacacctaaagatgttgagggtgttaacgaaaatggagcagaagcagttggtctttaccgtacagagttcttatatatggattcacaagatttcccaacagaagatgagcaatatgaagcatataaagcagttcttgagggtatgaatggtaaaccagttgttgttcgtacaatggatatcggtggagataaagagcttccttactttgatcttccaaaagagatgaacccattcttaggattccgtgcattgcgtatttcaatttctgaaactggtgatgcaatgttccgcacacaaatccgagcacttcttcgtgcttcagttcatggacagctacgcatcatgttcccaatggttgctttgcttaaagaattccgtgctgctaaagctatatttgaagaagagaaagcgaacttgttagctgacggtgtagcagtagctgaaggcattgaagttggtattatgattgaaatcccagcggcagctatgcttgcagaccaatttgcaaaagaagttgatttcttctcaattggtactaatgatcttatccaatacacaatggctgcggaccgtatgaatgagcaagtttcatacctctatcaaccatacaatccatcaatccttcgtttgattaacaacgttatcaaagctgctcatgctgaaggtaaatgggcaggtatgtgtggtgagatggccggtgatcaaactgcggttccacttcttgttggtatgggattggatgaattctcaatgtcagcaacctcagtacttcgtacacgtagcttaatgaaaaaattggacacagctaaaatggaagaatacgctaatcgtgctctttcagagtgttcaactatggaagaagttatcgaacttcaaaaagaatacgttgactttgactgagaataataaaaaagtagggattaaaaaatctctacttttttattgaaagtttggatattgttaagtttctaagaaaaatatgtcagataattgaaataaatagataaagtgatagaataaacctattacaatgtaaaaggagatttactttgacaaaagaatatcaaaattatgtcaatggcgaatggaaatcatctgttaatcagattgagattttgtcaccaattgatgattcttcattgggattcgtgccagcgatgactcgagaagaagttgatcatgctatgaaagcgggtcgtgaggctttaccagcctgggctgctttgacagtatatgaacgtgcacaataccttcataaagccgcagacattattgaacgtgataaagaagaaattgctactgttttagcaaaagaaatttctaaagcttacaatgcttcagtaactgaggttgtaaggacagctgatcttattcgttatgcagcagaagaaggaattcgtttatcaacttcagctgacgaaggtggaaaaatggatgcttcaacaggtcataagttggctgttattcgtcgtcaaccagtaggtatcgttttagcaatcgcaccttataattaccctgttaacctctcaggatcaaaaattgcgccagctctaattggtggaaacgttgtgatgtttaaaccaccaacacaaggttcagtctcaggacttgttttagcaaaagcttttgcagaagcaggtcttccagcaggtgtctttaatactattacaggacgcggttctgagattggagattacattgttgagcatgaagaagttaattttattaactttacaggatcaacgccagttggaaaacgtattggtaagttagcaggaatgcgtccaattatgcttgagttgggtggtaaggatgcaggtgtcgtcttagctgatgctgaccttgacaacgctgctaaacaaatcgttgcaggtgcttatgattactccggacaacgctgtacggcaattaagcgtgtacttgtcgttgaagaagttgcagatgaattggcagaaaaaatatctgaaaatgtagcaaaattatcagtaggtgatccatttgataatgcaacggtgacaccggttattgatgataattcagccgactttattgaaagcttagtagtagatgcacgtcaaaaaggtgcgaaagaattgaatgaatttaaacgtgatggtcgtctattaactccaggattgtttgatcatgttactttagatatgaaactagcttgggaagagccttttggaccaattctcccaattattcgtgtcaaggatgcagaagaagctgttgctattgccaacaaatctgattttggattacaatcatcagtctttacacgtgatttccaaaaagcatttgatatagcaaataaacttgaagttggtacagttcacattaacaataagactggacgtggtcctgataatttcccattcttaggactcaaaggatctggtgcaggtgttcaaggtatcagatattcaattgaagcaatgacaaatgtaaaatcgatagtttttgatatgaaatagacgtaaaacgactcaactattgtcagttgagtcgttttataaacctcttttacattaaaaataaagaattatataatcttctaaagtggttttatttttgtgatataattgtcataaaaaataacaaaagagtcattatatgaagaaattaattataggtatttttagtctaattattatagcgattcttgcttggcaaggtttttcgtttttgaaacataaagaaataaaacttcaacaagctgttgttgaaaaagaaattcgcatagccgagaaaacggtagaagtggtgaaaagacagaaaactgaacgtgttctttttcttgaacctaaaggatatgacaaaagtctaagcgctgatattttaaagtggaatcaaaaaagctttgagcataaaaaattttatgacaatcaatacattattctacgtcctcaattagcagattctaactttgcaaatgttaaaaaattatccatttatcaaatcttatatcaaaaagaaaaaggaagtatgtttcaaaaatcaagtcgccttttgagaacctacttacttgatcaaaataagaaaccttttgaattagatgagcttttagctcataatatatctggatttaaggctattttagaaaatatagctccaggaactcaactaaaggaacatgatagcaataaagaatttttaaaaactggaagagtaacagatgggctagatgttaaagatggtaagttaattattaatgatttaaaattaccacttgataaattatataatgtgatcgatgagtcatatttaaaatcaagtgatctagatttagtttctaatttaaaagctaaagcaccacgtgttgcacttacctttgatgatggaccaaatgaaaaaacgactcctaaagccttagaaatccttaaaagatataatgctaaagcgactttctttgtaatgggacaaagtgctgtagggcacacagatattttacaaaggatgcatgctgaaggtcatgagattggtaatcatacatgggatcatcctaatttaaccaaactaccagcggagaaaatcaaggaagagattcataagactaatgatctgattatgaaagcaacaggacaaaaaccggtgtacttacgtcccccttacggagcaacaaatgctactgtaaaaacagtgacaggattgaaagaaatgttgtggtcagttgatacagaagactggaaaaatcataatacacaagcaatgatgaccaatatcaaaaaacaattacgtcctggaggagtgattttgatgcatgatattcaccagacaaccatagatgctctgcctacaattatggattatctgacaacccagggctattattttgttactgtaggtgaattatattcaacgccttaataaaaaaagaaacaagttacttgtttctttttttattttaaatgtaatttttgattgtgaagtacaagttctgtaacggtggcgtattttttaagttgtttgagctcttctttatgtgttacaaatgtaataacacatccctctttccccatacgaccagttcgtccagaacgatgtgtatatgtttctttgtcgcgtgcgatatcaaaattaatcacatattctaggttgtcgatatcaatgccacgagctaccaaatcagttcctaggagtaatgaaatatcatggtttttaaatttctctaagataactttacggaatttaatattaatatcgcttgctaaagaaactgccgaggccctattaaattgtaaacgttcttcacatgcacctaagtctgataagctgttaaaaaagacaagacctctaaaatcaggaatatttgaaaatttacgaagtaggtcagtacgctctcttttatcaactgtaatataataatgttttatagtatcaagtttttgattagatagatcgattgttatagtgttatcggcaagtttactattgtccagtttgttggtggcactaatgtaaatcatttgctgatcacgaggaacgcgattaataatattgtccacaaaatgatattgtgagtcgccgagtaattcatcgaattcatcaaggacgatagtattaatgttcatcatttttattttttttagtttcacaagttcaaatacgcgtccagcagttcctataagaatttctggtcctttttttagtcgctcaatttggcgtttttgactagaacctgaaaggaatagttgtgcggtcagtcctaatggttcagcccattcttttgtaacgtcgaagatttgtccagctaattctgaatttggagctaaaattaagagttgttggctctttttaggttgcaacttaagaagcgttgggaaaaggtatgctagagttttaccagtacctgtagggctaattccaaggatattatcaccatcagtaataggttgaaaaagtttattttgaatatctgttagatcatcaaattgacgctgggttaatttatcctgccattggtctggaaattttgttatcataagaatcctcttgttattttatatattatcattgttattataacatgctttttatttttagagcgttttcaataaaatttagactttaaaaaaaataagtttatagtacaatagatagaggataaatttaatttggagtgacaaatgcgtaaaaaacctattattattggtgttacaggtggatctggtggtggtaaaaccagtgtttctcgggcgattttatcaaatttcccagatcaaaaaattaccatgattgaacatgattcttactataaagatcaaagtcatttaacttttgaagaacgtgtaaaaaccaattatgatcatccccttgcttttgataccaatttgatgattgagcaattgaacgaattgattgagggacgtccggtcgatattccggtttatgattacacaaaacatacccgtagtgatagaactatccgccaagaaccccaggatgtcattattgttgagggaattttggtattagaagatcagcgtttgcgtgatttaatggatatcaaattatttgttgatacagatgatgatattcgtattattcgtcgtattaagcgtgatatggaagagcgcgatagaagtttagatagtattattgaacagtatacagaagttgtaaaacctatgtatcatcaatttatcgaaccaacaaagcgttatgcggatattgtaattccagaaggagtaagtaatattgtcgctattgatttaatcaataccaaagtggctagcatcttaaatgaagcaaaataaacacaatggtttgtgtttatttttttgttttatataggatggttatttagttttagtaactttcaaattatgctataataagtgctatgaacaagtctaagaaaatcgaaaattatcaattattattactacaagcgcaagctctattctcagatgaaacaaatgctcttgccaacttatcaaatgcttcagctatgctaaatgctatgcttccaaattctgtatttacaggcttttatttatttgatggagaagagttaattcttggccctttccagggtggtgtatcatgtgtgcatattactttaggaaaaggtgtttgtggtgaatctgcacaaactgctaagacgctgatcgttgatgatgttacaaagcatgctaactatatctcctgtgattcaaaagctatgagtgaaatcgtagtacctatgtttaaaaatggcaaacttctaggagttctagatttagattcttctttagtagcagattatgatgagattgatcaagaatacttagaaaaatttgtaggtattctagtagaacatacgatttggaatttggatatgtttggagttgaaaagtaatgtatcaggccctttatcggaaatatcgtagccaaacatttgatgaaatggttggacaaagtgttatttcaactactttaaagcaagctgtgtccagcaaaaaaattagccatgcttaccttttttcaggacctaggggaactggaaaaacaagtgctgctaaaatatttgcaaaagcgatgaattgcccaaatcaaattaatggcgaaccttgtaatcattgtgatatttgtcgagatattacaaatggtagtttagaggatgtcattgaaattgatgctgcgtcaaataatggtgtcgatgaaattcgtgatatcagggacaaatcaacttatgctccaagtagggcaacctataaagtttatattattgatgaggttcatatgttgtctacaggtgccttcaatgcactattgaaaacacttgaagagccaacagaaaatgttgtttttatattagcaacaacagaactccataaaatccctgcaacaatcttatctcgtgtccagcgctttgaatttaaagcgattaaattattagctattcgagatcatttagcacagattttagataaagaagctatttcatatgatttggatgctctgacactagtcgctagacgagccgaaggtggtatgcgtgatgctttatcaattctcgatcaagccttgagtttagcgaaagataaccacatttctttagatgtagcagaagaaattacagggagcatttccttatctgctatagatgattatgtatcgaatatattggctcacgatacaactgaagcactcgctaaacttgaagtaatctttgatagtggcaaaagtatgagtcgttttgcaacagatttattgatgtacttaagagatttacttgttgttcaagcaggtggtgaagatagtcattcaagtgatacttttatagccaatcttaatgttaaacaagatattttatttgaaatgattgataaagtgacatctgttcttcctgagataaaaaatggtagccatcctaaagtttatgcagagatgatgaccatccaattgtctgaaatggtagaaaaaaattcgtcaaacatacccgcagatgtgacagcagaattagatagtcttcgtcgagagttaaaatcgttaaaaaacgaaatgagccaactctctcgagcagatcaaagttcatcaactcaaaaagtaaaggttaataataagacattcacatttaaagttgaccgtacaaagattttgaccattatggaagaaacggttgtagatagtcaacgttcacgtgaatacttagaagctttaaagagcgcttggaacgagatattagataatattacggctcaagatagagccttattaatgggatctgaacctgtcttagctaatagcgagaatgctattttggcatttgatgcggcctttaatgctgaacaagctatgaaacgtaccgatctcaatgatatatttggtaatattatgagtaaagcagcaggtttttcacctaatattttagctgtacctagaaatgattttaatcaaattcggagcgattttgcaaagaaaatgaaagctcaaaagacggaaacagaacctgaagttaatcatcaaattccagaagacttttcttatctagcagaacgaatagcaatcgttgaagattaaaacgtaactaaaaatagttgcctgttacaggcaactatttttttgataagttttttaattatttagtagattctgttataatggtgatatgacaaaacgacaatttatttttatggcgcttttatgctcttttgaaacttatttttttaatcaatccgttatggatggctcctggatttttgctattttttggggagttttattacttcgagatcttcaaaaggtgtatgcgatttcaaaattcacaaaagagcttatcaaatctaccaagaagaaagactgatttcgccactgcgaagtgttttcaactgaccatcatctaactcaaccactaaatatcctttatctgtaatatcaatagctttcccagaatacattgtttgaccatccataaagctaacggttctatctaagactagggatttttctctatatacctttaagtgatcctctagtggaatattgaaaaagagattccagatttctgtaatcaattgatttctagttatggtcggttgctctgtaaagagactacctgcgcgcttagttaacgccctagggaactctttgatatagaaattgatacctaatcctataataacattcgttaccaacccactctcaacagaagcgatagcctcggttaaaataccagctatttttttattatctaaataaatatcattgacccacttaatttcaggagtaattcctgttaaccgtgagatagcttttacagcactagaggctaccatgacagtataaggttttatatcttcaatcggtacattaggttgtaataaaagagacatatagatgccgccttgatttgatgtaaagaaaggtctatcaaaacgtcctttagcttttttttgattaggagctaaaaaaaggtgtggagtctttaatttactttctatccccattttagcatctagttgggttgaagcactattattattaagactaaccttaataccaatttcttgttcgagttgttctggtaataatatgtcacctgataccaatcggtagcccttgttagtgacagactcaatctctaggcctaattcttctaacgtttttatacctttccaaatagctgtgcgggaaatattaagttgatttgccatagtttctccgctaataaagttgttattttttgatagtatttgataaattttttcgtaggttttcataaatctagtatagtataaatcgagaaaaaagactaaagaaaatagagatatttttttatttattggtaacttatttcacaaaagatgaaatagtggtacaatagctatatgagtcccgaaaaggtagcctagaggctagttctttgtaactcgacacattttacattttaggggggacatttttatgtcagaacgtaaacttttcacgtctgagtcagtatctgagggacatcctgataagattgctgaccaaatttccgatgcgattttagatgcaattttagagcaagatccagatgcccacgtagcagccgaaacagctgtttatacagggtcggttcatgtatttggcgaaatatcaacgacagcctatgttgatattaaccgagttgtccgtaacacaatcgctgaaattggctatgataaagctgaatatggcttctcagctgaatctgttggagtgcatccgtcactcgttgaacagtcgccagacattgcacagggagtcaatgaagctcttgaggtacgtggttctcttgaacaagatcctttagatttaattggtgcaggtgaccaaggtttgatgtttgggtttgctgttgatgaaacacctgagttaatgccattgccaatttctttagctcatcagttagttaagaaattgacagatctacgtaagtctggggaactcacttatcttcgaccagatgcaaaatctcaagtaacggttgaatatgatgaaaatgatcaaccaattcgtgtggatgcagtagttatttcgacacagcatgatcctaatgtaactaatgaccaactccataaggacgtgattgagaaagttatcaatgaagttattccaagccattatttagatgaccaaacaaaattctttatcaatcctacagggcgctttgttattggaggccctcaaggagattcaggactaacaggtcgtaagattattgtagatacttatggtggttattctcgtcatggtggtggtgcattttcaggtaaagatgctactaaagtagatcgttcagcatcttatgcagctcgttatattgcaaaaaatattgttgcagctgatttagctaaaaaagtagaagtacaacttgcttatgcaattggtgttgcccagcctgtctctgtgcgtgtagatacatttggaacaggtgttatagcagaagcagacctagaggcagctgtacgtcaaatatttgatttgcgaccagcaggcattattaatatgttggacctcaaacgacctatttatcgacaaacagcagcctatgggcatatgggacgtactgatatcgatttgccatgggagcgagttgataaagtccaggccttaaaggattttattgctagcaaataataaaaagcgtaaacgaaagtttacgctttttttgctcatgataatttatagaacatttataaaatcttataataaactggttaagtataggaaatactgcatatttcttgaaaatatggtgtatattgtgaataaaatgatggccaagttaattgaattttcctatcgaaaaatttttcaaaaaaataatttcacactcaaatcatttgattatcaaataaatatagcctttataaaaatattatataagtataaaatgtaaaaaaaataaaaaaatgatatttttatttgatttaaatgtatttaataaaaatacaaagtttctaaaaaaagtaaaaattccatctcgacaaacagcgttagttattataaccgaacattattgtccttaaagcatgaaaacaaaaacaaaagttcgtaatttaattgatttgccatgttactaatcttatgctaatatattatctcgtgataagtttttgatgtaaaaattatcatgaaaaagaaaagagagatggaaatgaaaaaacaatttttaaaatcagcagcgattctatcgctagcagtaacagcagtatctacaagtcagccggtaggggcgatagtgggaaaagatgaaacgaaattaagacagcaacttgggtatattgattcaaaaaaatctggaaagaaaattgatgagagatggggtgaaaaaatttataactatctaagttatgagctcattgaagcaaacgaatggattaaccgaagtgagtttcaggaacctgagtatagaactattttatcagaatttaaagataaaatagatagtattgaatactacttaattaacttaagtaatattgctaaagaagatgcgcatcaaagaaatattcttcaatcattagataaatatgaaaaaagtggaatatataatttagaccaaggtgtttataattatatatatcaagaaattagttcagcgaagcacaagttttcggatggggtagataaaatttatcgtttagatagtactttatttcctttctctgtatggtatgataaacatttagataataatgataactacaaggataataaagattttaaagagtacattgctttattaaatgaaattacacgaaaagcaaggttaggatatcaaattgtaaataaccataaagatggggagcataaagatgaagcagaaatactggatattttaatcagagatataacttttgtttcaaaagatgctcctggatataaatatattccaaataaaagaattgcagcgaaaataattgaagatttagatggaattatcaatgacttttttaagaatacaggaaaagataagccttctcttgaaaagttaaaggacacagaattccataaaaaatatcttaattcaactgaaccgtatagtattgaaactaacttaccttcaaattataaagaattgaaggaaaagcaaataaaaaaattggaatatggatacaaaaagtcttctaaaatttatacgtctgctcattatgcactatatagtgaagaaattgatgctgcaaaagaattgcttcaaaaagtgaagattgcaaaagataattataatgaaattaagtccatgaatctaagcccttcaatttttaatcagtatttacaacttcttcaaatagttataagttcagagataaatctaaaaaaggcactcgataacactgtggatttacccatagaaaataattttaatacattggacattcaatataataaattagacactgctattaagtcacttcgaaaatttgtaactaagtataaacaagaagtaagaaaagctactaagagttattctaaaaaagaattagtaaatgcagagttaacaaaagtaatttctaatgacaatattttattagacatgcaagcaattagttccaattatgggtctactaaaaagtttgtttattcagtcaaaagattaccttacgtcccgcaagtaattatgacaacaacgtctaatgtacttatgcctcaaaagcaagttgaaaaagtgaagctactcaccccatttacaatttctaataaagaagtattgaatcatgactcactagtagaaaatgatgctcaaaaacaaaaagtagaacaggaaaaaactaaatcgctagctcctcaaaaaggggctgtaaaagaacaaactgagcaaaaagtatctggaaatactcaagagatagaaaagaaatctgaaactgtggcaactccacaacaaagttcagttgcgcaaacttctgtccaacagccggctccggttcaatcagttgttcaagaatccaaagcttctcaagaggagattaatgcagcacacgatgctatttcggcgtataaatcaacagtcaatattgctaatacagccggtgtaacaactgcggaaatgaccacgctcattaatactcaaacttctaatctttctgatgttgagaaagctttaggaaataataaggttaataatggtgcagtcaatgtattgagagaagatacagctcgtcttgagaatatgatttggaatcgtgcttaccaagctattgaagaattcaacgtcgctcgtaatacttataataaccaaatcaagacagaaacagttccagttgataatgatattgaagctattttagcaggttctcaagctaaaattagccatttggacaatcgtatcggagcgcgccacatggatcaagcttttgtagctagtttattagaagttactgagatgagtaaatcaatctcatcgcgtataaaagagtagacactgctatcaaggcgatcttaaacttttgtattaaactaacctaaaagatagaaagagactaatatgaaaaaaataacaactttaatcttagctagtagcttattactagttgcaacgacatcggttaaagctgatgataactttgaaatgccaacgcgttatgttaaaatgagtgaaaaatcaaaagcattttatcaaagactacaagaaaaacaacgtaaggcacatactactgtgaagacttttaataattcagaaataaggcatcaactacctcttaaacaagaaaaggctagaaatgatatctacaatttaggcattcttatttctcaggagtctaaagggttcatccaacgtattgataatgcctattctttggaaaatgtctcagatattgttaatgaagctcaggctttgtataaacgtaactatgatttatttgaaaaaatcaaatctacacgtgataaggttcaagtcttacttgcatcgcatcaagataatacagacttaaaaaacttttatgctgagttggacgatatgtatgaacatgtttatctcaatgaaagtagagtggaggcgataaacagaaatatccaaaaatataattagtttctaaactaacaaacattcctaaatataagacataaaaccctactcattgattagtgagtagggttttactgttttaaatagctttctgatcagaatgtaagccttgtcatttcaaaggaactatgttattattcttaagtaaattaaataggacatttggggtgcgtaacagctgagattatacccattgaacttgatgcagttagtactgtcgaagggaaatgtgtgccattacaagttttttgtggtggaaaagggcgtagtgtcttcttagtagacagctagctctagttaatcagataataaactccgtttgcttgcagatggagttttttgttgtcaaaattttttgtaggttgttgccccttatctgtcatagagaaggagttatgatgactaatcataaaacaaaaaaattaacggttttagcaattatgattgctttagatgtttttttaacgcccatttttagaatagaaggcatggcctttatgtctagtgtggttaatattatcgctggagttataatgggaccaatctatgcattagttatggcacttgtaacggcttttattcgtattttaactcaagcaggagtagcatctgttgcacctttagctattctaggagctggtccaggagctttcttagcgggttggttttatcggttttatgcgaaagactggatgtcttgggtgggtgagtttataggaacagggataattggagcacttttatcagctccaattatggtctggttttggacttggacagcggatggaaatcacgaagtgttagctaaagcatctgcagctcaatccatttttctttttatgccaaggtttataggggcgactataattggcggtgttattgctttgttgctacttcagggattaaagcgggttcctgtatttatgacaatacaagcattatttaaaggagaaaaagtaaaatgaaattgagtttaaaagatgtattattgattgctctattagcggttgttctgggcgttgtttactttggagcaggctatatttcaaatgcttttgtaccttttgtaggccctatagcgcatgaagttatttatggtatttggtttgtggcaggtccaatggctctttatatattgaggaaaccaggaaccgctattgtagcagaattgttagctgctttgatagaggttttaattggatcaatttatggaccaagtgtactcgttattggtacccttcaaggtttagggtcagaattaggctttacactatttaggtatcataattacaagttgccagcttttatattgtctgctattttgacatcaatttttagttttgcatggagtttttatgccaatggacttagtgcgttttcattttcatataacattctgatgcttatagtaagaactgtttcatctattattttcttcttattaacaaagaatatatgcgaccaattgcatagaagtggtgtactgaatgcttatgggattcatgaaaggaagtagcctatgctatctgttgaaaaattagcttgcacccatggcgatagtcattatttatttgatgaagtgacttttagtcttaacccaggagaacgaattttaatcagtggctattcagggtgtggtaagagtacattggctcttttactatcagggttaaaagaaagtgggaaaggtcaagttttattaaacggctcattaatagaaccaagcgatgtggggtttctttttcaaaatcctgatttgcaattttgtatggatactgtggcgcatgagttgtattttattttagaaaatttacaaatagaaccggagcaaatgcaagatagaagtgagtttgtattggcacaagttggtttaaaaggatttcagaatcggttgatttatactttatctcaaggtgaaaaacagcgattagcattggcgaccatttttttaaaatctcctaaacttattattttagatgaagcttttgcgaatttggatcaagagagtgccagtcaactattacaattagttcttaattatcaagcaaacaatcaatcaatgctgattgtaatcgatcatttgattacttattatcaagatataatggatcactatttttggttggaaaaacggttgacaagggtcaattttgattatatgctcaatcgtttgaatgtcttcgaattagaaaagaaaagtcataatacaggtgacaaactgttatcaattaaagatttccaagttaaactttcaaaaaacaaattcatctcttaccttgattttgatttagcaagtggggagaggttgtgcttagatggaccaagtggcgtggggaagtctagtttgtttatgggattgttagggctttataggactaaagggaaaaaacaatttactcatagaaagcaaattcctataagctttttatttcaaaatcccttagaccaatttattttttcaacagtttatgacgaaatttttcaggtttgcaaggatagtaacaaagcgagggatattttggaaaccataaatctttgggataagaaacagttttcaccatttcaactaagtcaaggccaacagaggcgattagccattggcagtattttagctagtgatagtaaacttctattattagatgaaccaacttatggacaagatgcctatcacgctaatatgattacaactcttcttttgagttattgtcacaaaaatcattgtggggttatttttactagccatgatcctcacttaaaagagtgttttgcaacacgtttcttggaggtgtcatcttgttcaatttgaaaaactatcatccagctattaccttcctatgtttattaataccaaccttttcgtttagtttcacattgaggttaagaacgtctttgttatttctaattatagtagtaacactgcaatgcttcgtaaaggtttctttaaaaacttgggcgaaggtcaatctgatatcatttgtgatgggactctctttatttctagggacgtatttttggggaaaattaccccatcaattcgtcttagctagtctagtggcctgtcgtccgcttatttttatgaacgtgggtttgttatttcatgcatcacattctaattatgattttatagaatctctttatcaaactttcaaagtgcctagtcattttgcatatggtatttttgcggtctttaatcttctaccattaattaaattacaataccaacgtaatcgactcgcattccgactgaagaatcaggtaacttgggcattatcgcctagactaatattgtcagttttattaaagacgatatattgggtagaacagttagagttagcaatgctttctaaaggttttgaagtgggtaaagagcgaacacatgcttcaacttatcccgttcgttttcgagattatagtttacttggtatgagtattttattgtctataggaatgatttttaaataagtacaattagtttagtaatacaattgtgcatttatatagaatgagcgtgttctgctcatgagatcataacaaaggagattactatgttaaaagataagatgattgctaaaggagcaaaatatatccaatccatctatcaagatccatttattcaaggaattataaaagggcgtttagaccatgacgtaatctgccattatttacaggcagataatatctaccttgggaaatttgctgatatttatgccctgtgcttggcaaaatctgataatttacgagataaacaatttttccttgaacaaattgactttacattaaatcgggagttagcagatggtgaaggcccacatcaagccttggccgcttatactaatcgatcttatcaggatattatcgaaaagggtgtatggtacccgtcagcagatcattacattaaacatatgtattttcatttttacgaaaatggtattgctggtgctttagctgcaatgagcccatgtccatggatttaccatcaattggctaaaaaaataattgaggagaaccagtttttgaatggtaacccttttaataattggataactttttatgctaacgatacagttgaagagttaatggaaaactattttcgtatgatggattattatgcgcagaatttgtcaaaagagaagcaagctgatttggtagatgcttttgtgaaatcttgtcagcatgagagacgtttttttcaaatggcaataaatcaagaaaaatgggaggattaatatgacttatttagcaccagttttaactattgcaggaactgatcctagcggtggagcagggattatggcggatttaaagacatttcaagctcgtcggacttacgggatggctgttgtgactagtgttgttgctcagaacacttgtggggttagaggcgttcagcatatagaaacagctatcattgatcaacaactagcttgtgtctatgatgatattaagccaaaggcggttaaaacaggaatgttagcggagagggaaacaattagtttagtcgcttcatatttaaaaaaatatccgcaaccttatgtattagatcctgttatggtggcaactagcggacatcgtttaattgattcagatgccgtagaagcattaaaagaagacttattgccattagcaactattatcacaccaaatttaccagaagctgaggttttagtgggatatgacttatcagatgaagtaagtattattaaagcaggttacgatattcaaaaacaatattctgttagaaatgttcttataaagggaggacatctagatggcttggctaaagattatttatttttggaaaaagaagggttgataactcttagtaatcaacgtatcaatactattcatactcatgggactgggtgtacatttgcagcagtcgttgcagcggagttagctaaagggcaatcaattctaaacgcggtaagtaccgctaaatcatttattacttcagctatcgaaacagcgcctgagttgggccttggaaacggtcctgtcaatcatactagctatcaaggagactaaaatgtatttagaacaattaaaagaggtaaatcctttaaccatttgtatcactaataatgtggtcaaaaactttacagccaatggtttattagctttaggagcttctccggctatgagcgagtgcatagaggacttagaagacttgttaaaagttgcagatgcattattaattaatataggaacactaacaaaagaaagttggcaactttaccaagaagcaatcaaaatagcaaataaaaaccaagttccagttgtattagatcctgtagcggcaggagcaagtcgttttcgattagaagtgtcacttgatttattgaagaattattctattagtttacttacaggaaatggtagtgaaatcgctgctttgattggtgaaaaacaagcgtctaaaggggcagatggcggaaaagtggctgatttagaatcaattgctgtaaaagccaatcaagtttttgatgtgccagtggttgtcacaggagaaactgatgctatcgctgttagaggagaagttcgcttattacaaaatggtagtcctttaatgccacttgttacaggaactggatgtctattaggggcagtattggctgcttttattggtagttctgacagaagcgatgatcttgcttgtctgacagaggccatgactgtttataatgttgctggagaaattgcagagaaggtggcaaaaggtaagggggtgggaagtttccaagttgcatttttagatgccctttcccagatgaaatcagaaatgattatggacaaataggtggtgtcagtagatgaaagatacattgaaattatattttgtttgtggaactgtggattgctctaggaagaatatattgactgttgttgaagaagccttacaagcaggtataactctatttcaatttagagaaaaaggttttacagcattacaaggtaaggaaaaaattgctatggctaagcaactccaaatactttgtaagcaatatcaagttccttttattattgatgatgacattgacttagttgagttaattgatgctgatggtcttcatattggacaaaatgatttacctgttgatgaggcacggagacgtttaccagataaaatcatcggtttatctgtgagtacaatggatgaatatcagaaatcacaattatctgttgttgattacatcggaattggtccttttaatccgacacaatcaaaagcagatgctaagcctgctgttggcaataggacaacaaaggcagttagagaaattaatcaagatattccaatcgttgcaataggcggaatcactagtgattttgttcatgatattatagaatcaggtgcagatgggattgctgttatatcggctatttcaaaagcaaatcatattgtagatgcaaccagacaattgcgttatgaagttgaaaaagctctggttaataggcaaaaacacagtgatgtaatcaaataaggctacatcgttaattataagaatttttaagatattatatcatcacacaatactggtatttgaaaaagaatttaaactatgataatatagtagagttgaattctagttaaagaaagatttgaaagtatgcgtaaaattattattaacggtggcaagcaactgacgggagaagttgctgtatcgggtgccaaaaatagtgtagttgccttgattcctgccactattcttgctgatgatgttgtggtcttagatggagttccggctatttctgatgttgacagtttagttgacattatggaaactatgggagctaagattaagcgttatggtgagacgcttgaaattgatccatgtggcgttaaagatattccaatgccttatggcaaaatcaatagtcttcgtgcatcctattatttctatggaagcttattggggcgttatggtcaagcaacattaggtttacctggtggttgtgatttaggcccccgtccgattgatttacatttaaaagcttttgaagcgatgggagctagtgtttcttatgaaggtgattcaatgcgtctagcaacaaacggaaagcctttgcaaggagcaaatatttatatggatactgtcagtgttggtgcgacaattaacactataatcgcagcagctaaggcaaatggccgtacggttattgaaaatgctgcacgtgaaccagaaattattgacgtggctactcttttaaataatatgggagctcatattcgtggtgctgggactgatgttattacaattgaaggtgtgaaatcgctccatggcacgcgtcatcaagtaattccagatcgtattgaagcaggaacttatattgctatggcagcagctatcggacgaggaataaaagtgaccaatgtgttatatgaacaccttgagagtttcattgctaagttagatgagatgggagttcgaatgacagttgaagaggattcaatttttgtcgaagaacaagaaaggttaaaagctgtatccataaaaacctcaccttacccaggatttgctacagatttacaacaacctctaactcctttattactaacagcagaaggaaacgggagtttattagatactatctatgagaaacgtgttaatcatgttcccgaattagcacgtatgggagctaatatttctaccctagggggcaaaatagtttatagtggtcctaatcaattatctggtgcacctgtaaaagcgacagatttgcgtgcaggcgctgctttagttatcgctggcttaatggcagagggacgaactgaaattacgaatatcgagtttattttacgtggatattctaatatcatcgagaaactaacatcattgggtgcggatatccaattggttgaggaatagtatatataacaaagagttgagaatatttcttagctcttttcttcttgttttagattaagtcacttataggtatttgaaatctcttgtggtataatattatcatggatatatggacaaatttaggacggtttgcattcattgaaacagaacatgttaacctacgtcctgttgcctacactgatagggaagctttttggcgaatagcttcaaaaaggacaaatttacaatttatttttcctgttcaaaccagtaagaaggaaagtgattttcttttagttcattcttttatgaaagagccattgggagtttgggcgattgaagataaagttagtcataaaatgtttggagttatccgttttgaaaacattgatttatctaaaaagacagctgaaattggctattttttgaaagaaagttcttggggtcaaggcattatgactgaatgtctaaagacactttctttttttgcttttcgagagtttgggatggacaaattgatcatagtaacacataaagagaatattgctagtcagaaggttgctttgaaggcgcatttcaaacaatctaggagttttaaaggaagcgaccgttacacacgccgtataagagactatattgagtttcaattaactaggggtgattatcgttatgagtaaacatcaagaaattttggagtacctagaaaatttagctgttggtaagagggttagtgtacgcagtatttcaaatcatttaaaggtgagtgatggcactgcataccgcgctataaaagaggcagaaaataggggtattgttgagactagaccgcgtagtgggacagtacgtgttgctcaaaaagcaaaggttaatattgaaaaactgacttatgctgaaattgcaaggattagtgactcacaagttgttgcaggaatagagggactcagcaaggagtttagtaaattttctataggtgcaatgactcacagaaatattgaaaaatatttggtgcaaggagggttattgattgttggcgaccgtgatgagatacaacatttagccttacaacatcaaaacgctatcttagttacaggtggctttaatgtttccccatctgtttgtcgtttagcagataaacttcaaattcccgtaatggtaacacactatgatacattcacagtatcaacgatgattaatcacactttgtcaaatgccaaaattcgtactgatttaaagaccgttgaacaagtctatcagtcgcaaatggattacggtttcttagcgcaggatgataccgtaaaagaatttaatcttcttgttaaacaaactaaaaatgttcgttttccaatagtcaaccaagctaatgttgtcgttggtgttgttagtgttcaagatattcttggaaaagataaagaagtaaaattggcaacagtcatgtcaaaaaatatcattgttgctaaacctcgaatgagtctagctaatatcagtcaaaaaatgatttttgaagatttgaatatgatgccagtagtatcggatgactttgaattattaggcgttattacaagacgacaagctgtagaaaatttatcgatgtcgcaagggacggatttatacacctatagtgatcaaatcttgtctaatttacaaattgaagatggtcacttttcgtttttagtagaacccgctatgattgaccatacaggtagcttaacacaaggagttttgacggagttcttaaaagaaatttgtattcgtgtcttaactcgtaagcatcaacgcagtattgttgttaaacaaatgacactttatttcttgcaacctgttcaaattgatgaaataataatggtaacgccaacaattatttcagaaaaacggcgcgaagctacactcgatttagaattaaaattagaaaataaaattattgctaaagctatgatagcggtaaaaattaattagatataaggagaataaatagaaaatgattacattaaagtcagcacgcgaaattgaagcaatggatagagcaggtgattttttagccagcatccacattggacttcgtgatattatcaaaccaggagttgatatgtgggaagttgaagaatacgttcgtagacgttgtaaagaagaaaacgtattgccattgcaaatcggggttgatggtgcagttatggattacccatatgctacttgttgtgggcttaatgatgaagtggctcatgcctttcctcgtcattataccctaaaacaaggtgaccttttaaaagtagatatggttttaagcgaacctttagataaatcaattgttgacgtttcatcgttaaactttgacaacgtggctcaaatgaaaaagtacacggaaacatatagtggtggtttggcagactcgtgttgggcttatgctgtaggtgaagtttcacaagaggtgaaagacttaatgtctgtgacaagagaagcaatgtatattgggattgaaaaagcagttatcggaaaccgcattggtgatattggagctgctattcaggattatgcagagagtcgtggttatggagttgttcgtgatttggttggtcacggtgttggtccaacaatgcatgaagagcctatggtgcctaactatggtacagcaggtcgaggtctccgtcttcgtgaggggatggttttaaccatcgaaccaatgattaatactggtacttgggaaattgatacagacatgaaaactggttgggcacataaaaccttagatggtggtctttcttgtcaatatgaacatcaatttgttatcactaaagatggtcctgttattttaacgagtcaaggagaagaaagaacttactaaaatgaaattaaaaaaattctttgaggatttgctggctaaactagaatatagacccattcaagtttttatgcgtcattttcaaagtgcagagatggacttatcagccatagcagttgcttattatctattagtgacagcttttccattactagttattgctgctaatatttttccttattttcatattaatgtgtcggatttattgtcacttatgcaaaaaaatcttccgaaaaatatttatgaacctgcctcacgcttagcagtagatgctttttcgaaaccgtctaccggcattttgggattcgcgtcattaacagctttttggacaatgtctaaaagtttgacctctcttcaaaaagccattaataaagcatacggtgttgaccaacacagagactttgtgattagtcgtttagtgggtgtggggactgggctgatcatcctatttttactgacttttgttttaattttttcaaccttttcaaaaccagttttacagataattgtaaacatgtatgatttgggagatactctaacggcgtggcttttaaatcttgcacaaccagttacatttttgactatatttttaggtattggaattttatactttattttacctaacgcacgaattagaaaagtacgttatgtcattccagggacattattttcaacgtttgttattggtttttttagtaatttaattagccaatacgtcttaaatagggttgagaaaatggtagatattaaaacgtttggttcggtcgttatctttatcttaatgctatggtttattttcttagcccacattatgattttaggtgcaatactgaatgccagcgttcaagaaattgcgacaggaaaaattgaatcaaggcgtggagatattatgtctcttatccaaaaatccaaagaagaaaaataagaaaagacagctcttgttagagttgtctttttttgtctttaaaaataacaaatttgctcaagatgtagttgagtaaaataattaatatttgagatacaaggctttcaatggtgttgattttatttaaattgtgctgaacgaattgtccgataatagaaggaaattgatcaacaaaaataacagctaatatcaaatctaatcctaatgtgcctaatctagcgatgacaaatgtttgtaagcgttgaagctgttcaattttagtttgtttaaaaacaaatcgatcatttgtaaaaaaagcaaaaagtatagctattatgttagcaactattgcagagaatggagcgtcctgcgagaaattaaaaatcccttgtcgaataactaaataaagaagggatgttaatagtccgaacagtaaatataagctgacttcattttgaatactttttttcagtaacgattttaatttaaccatatttttattatatcacggatgcttcaaagtgatgaggaaatctcccataagcttggctttactttttgtttgtgatatacttagtaagttgttttacacaacccttgatgcttagttccctttcatcaagcatattacaaacgttagaagtgttaactatctaaacgttaaaggagaaattatgaacacatttacaactcgcgattacgctcacatggctattgtaacagctatctatatcgttttaaccataacgccaccttttaatgctattgcttatggtgcttatcaattccgtgtttcagaaatgctaaatttcttggccttttaccaccgaaaatacctttttgcggtaacgttaggatgtatgatttctaatctttatagttttggaatgattgatgtctttgtaggtggtggttcaaccttactttttgtttatcttggaaccattttattcaagcaatatcaaaaagattatctatttaatggccttattaacaaagcattctttttcttttctttcttctttgctgcttcaatgattacggtagcagttgaattgaaaattgtagcaggattacctttattattaacatggttaacgacagctgttggtgaattggcttcacttttggttggagcagtccttgtggataagttgagtagacacgtcgattttacaaaataaatatattataaagcgcgagacattgatctcggcttttttgtttgggtttatagttagcatagctagaaaatgctgcaacttttatgagaaatgctccaatttttactaatatccttagtctttgtgataaaatagaaatatggaaaatcgtatgaatgaattagtatctttgttgaatcagtacgcaaaagagtattatacacaagataatcccacagtttctgacagtcaatatgaccagttatatcgagagttagtagaattagaaaagcaacatccagaaaacattttgccaaatagtcccacacatcgagtgggtggtttagttttagaaggctttgaaaaataccaacatgaatatcctttgtattcattgcaggatgctttctcaaaagaagaattgatagcctttgataaacgtgttaaagcagagtttccaactgctgcttatatggcagagctgaaaattgatggtctatctgtctcgttgacttatgtaaatggtgttttacaggttggggcaacacgtggtgatggcaatattggagaaaatattactgaaaatttaaagcgtgttcatgatattcctctacatttagaccaaagtttagatattactgttcgcggagagtgctaccttcccaaagaatcttttgaagctattaacatagaaaaacgagcaaatggtgagcaggaatttgctaatcctaggaatgcagcagcaggaaccttgcgccaattaaacacaggaattgttgcgaaacgtaaattagcaacttttctttatcaagaagctagccctacgcaaaaagaaacacaagatgatgttttaaaagagctagaaagctatggcttttcagtcaatcatcatcgtttaattagctcgtctatggagaaaatttgggattttatccaaactatagaaaaagatagagtttccctcccttatgatatcgatggtattgttattaaggttaatagcatagcaatgcaagaagagctgggcttcactgtaaaggcacctcgttgggcgattgcatataaatttcctgctgaagaaaaggaagcagaaatattatctgttgattggacagttgggcgaacaggagtcgtaacaccaacagctaacctaactccagttcaactagcagggacaaccgttagtagggccactctgcataatgtagattatattgccgaaaaagatatccgtattggagatactgttgttgtatacaaagcaggggatatcatccctgcagtcttaaatgtcgttatgagtaagcgaaaccagcaagaagtcatgcttattcctaaactatgtccttcttgtggtagtgaattagttcattttgaaggtgaggtggctttacgttgtattaatccgctgtgccccaaccaaatcaaagaacgtttagctcattttgctagccgagatgctatgaatattacaggttttggtccatccttagtcgaaaaattatttgatgctcatttaatagcagatgttgcagatatttatcgtttaagtatagagaatttattaactttagatggtattaaagagaaatctgcaactaagatttatcatgcaatccaatcttcaaaagaaaattctgctgaaaaacttctttttggcctaggtattcgtcatgtgggaagcaaggcgagccgccttttattggaggaatttggtaatttgaggcaactaagtcaagcaagtcaagaaagtattgcctcaattgatggactaggaggggttattgccaaatcacttcataccttctttgaaaaagaagaggtagataaactactagaggaattaacttcctataacgttaattttaattatctaggaaaacgagttagtacagatgcacaactttcaggtttaacagtcgttttaaccggtaagcttgaaaaaatgactcgtaatgaagcaaaagagaaattacaaaaccttggtgctaaggtgacaggtagcgtttctaaaaagactgatttaattgttgcaggaagcgatgcaggaagtaaactaaccaaggctcaagatttagggattacaatacaagatgaagactggttactcaacctttaagtgaggaagaaatgaagaaacaaaaaaaagcgcgtttaatttataacccaacttctggtcaagaaattatgaaaaaaaatgtagcggaagttcttgatatacttgaaggatttgggtatgaaacatcagcctttcaaacaacaccaactaaaaattctgccagagatgaagctactagagctgctcaagctggttttgatttgattgttgcagcaggtggagatggtactattaatgaagttgttaatggtattgcacctttgaaacgtcgtcctaagatggcaattattccaactggaacaactaatgattttgctcgtgccttaaaaataccgcgaggtaatcctattgaagcaactaaattaattggtaaaaatcaaatcgttaagatggacattggtcaagctcaagaggacaattattttattaatattgcagctgcaggtagtttgacagagttaacttatagtgtaccaagtcaattgaaaacaacgtttggctatcttgcttatctagcaaagggtgttgaattattacctcgagttcgaaaagtaccagtcaaaattactcacgataagggtgaatttatcggtgatgcttcaatgatttttgttgccatcacaaattctgtaggagggtttgaacaaattgcacctgatgccaaattggatgatgggaaatttacccttattttagtaaaaactgcaaatcttattgagattatgcatctcattcgtttggtgctagcaggtggaaaacatattaatgataaacgagtagagtatattaaaacgtcttatctaactatcgaacccctatcagacgagcgtatgatgattaacttagatggagaatatggaggagatgctcccattactctagcaaaccttaaaaatcatattaggttctttgctaatactgatgaaatttcagatgatgctttagttttagataaagatgaactagcgatagaagctattgcacagaagtttgctaatgaggtagatgatttagaaggattaggagattgatgaatggataatactgtcattgtacattaccatagccgaaagaaaaattactttaatttaagtttatggcagtggcgcgatggctcagagggtcaagatgctcatttttcacggtttgacagtttcggtgctgttgcgatactaaaatatcccttgccatattttttaagccattattatgtgattgttaaggataaaaattggcatcataaaacaatagattatcgcattgattgtactcaaggtggtgcacgtaaagaagtttggattgtagatggggatgacaatctgtattattctcgtcaagcagcagttagtagccatcattatagtagacgccaacctcatgcctacgacatggcaatcaatagtagagcgtttgacaaaaaatggggatttgatggttggttaggttttgaatattcagaaactaaaacggcttttagattatgggcccctactgcggaacgtgtagaactgattttatatcattcgacagatgaaacagcaagtgtatcaaaagttctttctatgaaaagagggacagccgtcaattataaaaatcataaagaaaatacccatggagtctggtttactgaacttgaaggaaactataattaccaagcatatacttatcgagtctactatagacgacgtacctttaaaattacgagagacccttattccattgcaacgactgcaaatggtaaaaggtctattgttattgctccagaagcattaactccggaagggtttaaaataagtcatggaaaagaagctaagtggcggctcgaaaaccccaatcaagcagtcatttacgaaatgcatgtgcgtgatttttcgatatctgagacttcaggagttaagacagattatcacggaaaatttaagggattgcatcaaaaaggtacggttaatcagcatggtgataaaacgacctttgattatgtacaagacctaggagttaactatatccaacttcaaccaattttcgatcatcatcagacatttgatgatgatggtcactatgcttataattggggatatgatcctgaaaactacaatgttccagaagcaagcttctctagtaatccacatgaacctgcaacgcgtattttagaattaaaatctgctatccaagcgtaccatgatgcaggcattggtgttattatggatgttgtctataatcatactttttcatcaactgattctgcatttcaactaacggttccagattattattatcgaatgaatcacaatggaacatttcaaaatgggtcaggctgtggtaatgaaacagctagtgaaaaagaaatgtgtcgtaagtatattcttgattcagttttgtattgggtgaaagaatataatattgatggttttcgatttgatttgatgggactacatgatgtagaaacgatgaacattataagaaatgagctaaataaaatcgaccctcgtattttggtttatggagaaggatgggacatgggagctggtctcacgcctcaaaataaagctaaaaaagataatgcttatcagatgcctggaattggctttttcaatgatgatgtaagagacgctgtcaaaggtgcggaaatttacggagaatttaaaaaaggcttagtttctggaaacagtacagaagatattgttgcaaaaggcattttaggaagtgatgagttagtatcatacattgatcctagtcaagttttaaattatgttgaagcacatgacaactacaacttaaatgatttgctatgggaattacatcctaatgacaacgagaaacaacatatttaccgagttgaagtagctagtgctatgaatctattgatgcaagggatggctttcatgcaattaggtcaggagtttcttcgaacaaagtgttatcctacaggtgataaaggtcaacttactcaagcagataaagaaagggctatgaattcttacaatgccccagaccaagttaatcaggtcaactgggataatgttacctttcataagagtactattaattttattaggaaaataattactttgaagacaaactctccttacttttcttattctagctttgaagagattcgcaaacatgtttttgtagagtctgctcaataccattcaggtttcataagttttacagtcgaagaacataagaaaataaaaataattttcaatattaaaggaaaacgcttgcagaattctttcataggtgatataataatatcaaatcatgaagaaggaaaagcgatagattcattagatgatgagctttctgtaatgatccttgatatcacaaaataacctgaaaacattcaggttatttttgtgtatattaaggaatttgatttgaatttgagtttcttatattttagttaatttttcggaaatatagagggtgaaatattttcagatgcgtctgtatgaggaaaatgtattcctctttttttgtaccattgaggaaatatttttgtcttatattgactagtaggacctgtgaggtgagtagatgtccaataaagatgagttatatacttttggaataggtgaaaattttcatctccagaattatttaggcgtacatagcgaaaatggaagcttttgtttcagagtttgggctcctaatgctgaaaatgttcaagttattggagattttacagattggcgaaatcgacctctccaaatgaacaaaaatcaagcaggagtttgggaagctaacagtttggatgcgcgcgaaggtgatttatataaatatttggttactcgtaaaggtggtcaagtagttgagaaaatcgatcctatggcagtttatatggaaagacgtcctggaactgcaagtgttattaaagttcttagaaataaaaagtgggaagatggtctttggatgggaaggcgcaaacgtctgggttttcagaagcgtccaattaatatttacgaagttcatgctggttcatggaaaaaagatgattttggacatcctatgactttttctcagttaaaagattacttaatcccctaccttgttgagatgaattatactcatgttgaatttatgcccttaatggcacatccgcttgatatgagttggggatatcaattaatggggtattttgcttttgaacatacctatggtactccagaagaatttcaagactttgtagaagcatgtcataaaaataatataggagttcttgtagattgggttccaggacactttattcagaatgacgatgctttagcctatttcgatggaactgctacttatgagtatcaaaatcatgatcgtgcgcataactatcgatggggagctctgaactttgatttaggaaaaaatcaagtacaatcctttttgatttcgagtgccttgttctggattgaacattatcatattgatggtattcgtgttgatgcggttagtaatatgttatatctcgattatgatgaaggaccatgggaagctaaccaatttggggataatcgtaatttggaaggatatcactttttaaggaaacttaacaaagtaattaaagagcgtcatcctaatgttatgatgattgctgaagagtcaacagcttctaccccaataactaaagacttagagtctggaggattgggttttgactttaaatggaatatgggctggatgaatgatatcctgcgtttttatgaagaagatcctctctataggcaatatgattttaatttagtgacttttagttttatgtatatattcaatgagaactttgtactagctttttcacatgatgaagtagtacatggtaaaaagagtatgatgcataaaatgtggggtgaccgttataatcaatttgctggtttacgtaatttatatgcatatcaaatgtgtcatcctgggaaaaaacttctctttatgggaagtgagtttggtcaatttttagaatggaaatataatgatcaactagaatgggaaaacttaaatgatgatatgaaccaaaagatgcaacgctatactaaacaattgaatcaattttataaagatcataagtgcctatggcgtattgatgattcctttgacgggctagaaattattgatgcggataataaatctgaaactgttttatcttttatacgaaaagatgataaaggcgatttgttactttgtgtctttaatatgactcctgtagaacgccctaactttactattggtgttccgcaagcgggtatttatgaagaagttttaaatactgaaatggaagagtttggaggtgtttggaaaaaccacaatcctgtaacgaaaacacaagtggctacatggaaagattatgatcatactttaagttttacattaccagcccttggggcaagtgtttggagaataaaacgtcggcttcgtaaataagtctgcaatttagtaacctcattttgaaaggaaagaataatatgaaaaatgaaatgttagcactcattctcgccggaggacaaggcactcgactcggaaaattgactcagagcattgcgaaacctgctgttcaatttggaggtcgttaccgtattattgactttgcgctttcaaattgtgcgaattcaggtattaataatgttggagttattactcagtatcaaccgctggaactcaatactcatattggaaacggatctagctggggactagatggtatcgattcgggagtaactgtattacagccatattctgcaacagaaggtaatcgctggtttcaaggtaccagccacgctatctatcaaaatattgactacattgatcgtattaatccagaatatgtactcattctctctggggaccacatctataaaatgaactatgatgacatgctacagacgcataaagataatttagcaagcctaacagtcgctgttttagatgttcctttaaaagaagcaagccgttttggaattatgaatactgattcaaacgaccgtattgtcgaatttgaagaaaaacctgaacatcctaagtcaacaaaggcttcaatgggaatatacatttttgactggaagagattacggacagttttaattgatggtgaaaagaacggcatagacatgtcagactttggtaaaaatgttataccagcataccttgaatcgggtgaacgtgtttatacctataattttgatgggtattggaaagatgttggtactattgaatccctttgggaagctaatatggaatatattggagaagataacaaattacatagtcgtgatcgttcatggaaaatctattctaaaaatttgattgcaccacctaatttcatgacagaagatgcaaatgttaaagattctttagttgtagatggatgctttgttgcaggaaatgttgagcactccattttatcaactaatgtccaggtaaaaccaaatgctattattaaagactcctttgttatgagtggcgcgactatcggtgaaggtgcaaagataaatcgagctattatcggtgaggatgctgttattggtgatggtgttgtgattgatggaagtaaagaagtagaagttattggttataaagaagtagcgggggttccaaatgaagattgataaatatactgcgattttaggaaatactgttagttacccagatatgcacagtttgacggataatcgtccgcttgcttctctaccttttgatggtaagtatcgtttaattgattttcaattatcctctttagctaatgcaggcgttagaagtatttatggtatttttcgtgggaataatgttcgctctgtttttgaccatattagaagtggtcgtgagtggggcttaggtacactgttgagtcactattctttaggattctatgatacagacgatgatactcgtacagtcaatggggattattacgatcaaattttaacttacttgaggcgttcgggtagcgaccagacgatatatatgagttgtgatatgctttgtaatattgacttaagtcaagtaatccacttgcataatgcaaatggtgcgcaagccaccgtggtttaaaaaaaatgccgagatcagctattgcagaggctaatcaagtcttgaccattgatgaatctgatcatgtagtgagtctaggtaaagctgtagataatgacgataaccaaaaaatgtctgctgagatttatgttatcgatacaccttggttaatcgaaaaaatggaagaggaagctcaaaataatgaaccacgtaaactccgcttcttacttcgtgatttaattgttgaaagtaatgctttggcttttgaatacactggttatttgtcaaacatttcttctattaaatcctattatgatgctaacatggacatgttaacaccaaataaattttattcgctcttcttttcaaaccaaaaagtttatactaaggtgaaaaatgaggaagctacttattttgataaacaatcaaatgtctctaattcgcaactagcctctggaagtattattaaaggttatttagaccattctatcgtttctagaaattgtctccttgaaaaagggactcgagtagtcaatagtattatctttccaaaagtaaaaatcggagaaggggcaaccattgaaaatactattattgacaaatgcgttaaggttgcatccggagttacattgaaaggtagtttagataaaccgttagtgattcctaaattttcagagattaatgaggatattatacaatgaaaataatgtttgttgcggcagagggtgctccctttgctaaaacaggtggtttgggagatgtgattggcgcactcccaaaatcacttagtaaaaaaggtcatgatgtcgctgttgtcatgccatattatgatatggtagaccaaaaatttggagaccaaatagaaaacctcatgtatttctatacagatgttggctggcgtcatcaatatgtaggagttaagagactttctcaagataatgttacgttctactttattgataatcaatattatttttatagaggtcatgtctatggtgattgggatgatggggagcgttttgcttatttccaattagctgctttagagttgatggagaaaatcgattttattcccgatgtcttacacgtccatgattatcatacagcaatgattcctttcttattgaaagagaagtaccactggattcaggcctataataatataagagcagtttttactattcacaatattgaatttcaagggcagtttggtccagaaatgttaggagatttatttggagttggcgctgagagatatgaagatggaactcttagatggaataattgtcttaattggatgaaagcagcaattctttactcagatagagtgacaacggtatcaccaagctacgcaaatgaaataaaaactccagaatttggtaaaggtttagatcaaattatgcgtatggaagcaggcaaattatctggaattgtaaatggtattgatagcgatttgttaaatccagaaacagatgcttttttgccatatcatttttcaaaaagcaacttagagggcaaaattaaaaataagttggctttacaggaaaatttgggcttacctcaagataaaaatgtaccattaattggtattgtttcacgacttaccgatcaaaaaggatttgatattattgcttctgaattggacaatatgcttcaacaagatattcaaatggttattttaggaacaggctatcaccattttgaagaaacgttctcttattttgctagtcgttaccctgaaaaactatctgctaatattacttttgacttaagattagcgcaacagatttatgcggcttcagatatcttcatgatgccaagtgcttttgaaccttgtggtctctcgcagatgatggctatgagatatggtagcttgcccttggtacatgaagttggaggattaaaagatactgtggtagccttcaatcaatttgatggtagtggtacaggtttttcatttaatcatttttcaggctattggttaatgcaaactctaaaactagcattagaagtttataatgattatcctgaagcgtggaaaaagttacaatggcaagctatgtcaaaagatttttcatgggatacagcatgtgttgcttacgaacaactgtatcagcaactacaataatcaccctattttagtgattagttgataagcttatcgaatctctatgctaaacgtttcttatgtaaaaccactttagtatagagattttattatcctataaggtaaaatattattaatgtaaagagacactatatcaaaaataaagtgttgtcatatcttaataagggattaaattaaagctaaaaaaactaaaaattgttatttgaaaaggattgtgtaaaccatctcaaactatttcatgaaaacgtaatcaaatgaggaaattcattgacatgcacaagaaataggaataaaataacggagtaaatattttttaaaggagaattctattatgaatttagctattttagcacttggtttcgccgtgatgggtgtttcaatcggtgaaggaattttggttgcaaatattgccaaatcagcggctcgtcagcctgaaatgtttagcaaactgcaaacattgatgtttacaggtgtggccttcattgaaggtaccttcttcgttctatttgcgtttacattcttagtaagatagacgacaatttagaaaaaaaggagggatgaggattggaatctacaagtaatccaaccgtatcttttttaggcattgattttgatttaaccatcctagctatgtctctcttgacaattactattatctttatcttagtcttctgggctagtcgtaagatgacaataaaaccaaaaggtaagcagaatgtcttagaatatgtctatgagcttgttaataatacaatctcacaaaatttaggacactatactaaaaattatagtttattgatgtttattttattcagttttgtcttcattgctaacaacttaggattgatgacatcattgaaaacacatgagcataatttttggacatctccgaccgctaattttggtgtagatattacattatcattattagtagcatttatttgtcatattgaaggtattcgcaaaaaaggaattggtggttatctcaaaggtttcttatcaccaacaccagcaatgcttccgatgaatttattggaagaagttactaatgttgcttcattagcattgcgtctttttggtaatatcttttctggtgaagttgtcactggattacttttacaacttgcagttttatcaccatttacaggtccactagcttttgcattgaatatcgtttggacagcattctcaatgtttattggtttcatccaagcgtatgtgttcattatcttgagctcaagttatattggacacaaagttcatggtgacgaagaagaataagaaaagagaggagaaatatgtcaatacttattaatagtacaacgattggtgatatcattatcgtatctggctctgtgcttctcttatttatcttaattaagacttttgcatggaaacaaatcacaggtatttttgaagcccgtgaacaaaagatagctaatgatattgatactgctgaacaggcacgtcaacaagctgaagcttttgcaactaagcgcgaggaagaactatctaacgctaaaactgaagctaatcaaatcattgataacgctaaagagacaggtcttgcaaaaggtgatcaaattatttcagaagcaaaaactgaagctgatcgattaaaagaaaaagcacatcaagatattgcccaaaataaggcagaagcactagcagatgttaagggtgaagtagcagatttaacagttttattagctgaaaaaattatggtatcaaatcttgataaagaagctcagagtaatctcattgatagctatattaaaaagctaggagatgcctaatgaataaaaagacgcaggctctaattgagcaatattcaaaaagccttgttgaagttgccattgaacataaaattgttgaaaaaatccaacaagaagtagcagctttaattgatatttttgaaacaagcgagcttgagggtgtcctgtcaagtcttgccgtttcacatgatgaaaaacaacattttgtgaagacattgcaaacatcatgttcaacttatcttgttaatttccttgaggttattgtacaaaatgaacgtgaagcacttctatatcctattttgaaatcagttgatcaggaacttatcaaagtgaatggtcaatatccaattcaaattacaactgcagttgctttgtctccagaacaaaaagaacgtctttttgatattgctaaaactaaattagctttaccaaatggacagttagttgagcacattgacccatctattgttggtggatttgttgtcaatgcaaacaataaagtaattgatgcaagtgttcgtaatcaattacatcaatttaaaatgaaattaaaatagaaagtggtgtgacttttggcaattaatgcacaagaaattagcgctttaattaaaaagcaaattgaagacttccagccaaattttgacgtcacagaaactggtattgttacatatatcggtgatggtattgctcgtgctcgtgggctagataatgctatgagtggagaacttcttgaattttcaaatggtgcgtacggtatggctcaaaaccttgagtctaatgacgtgggtatcattattttgggtgatttctcagaaattcgtgaaggtgatgtggtaaaacgtactggtaaaattatggaagtaccagtaggggaagctatgattggacgtgtcgtcaatccgcttggtcaaccagttgatggactaggtgaaattgagacgacagcaacacgcccagttgaaacaccagcacctggtgttatgcaacgtaaatcagtttttgagcctcttcaaacaggtctcaaagcgattgatgctttggttcctatcggacgtggtcaacgcgaattgattatcggtgaccgccaaactggtaagacgtctgtagcgattgatgcaatcttgaatcaaaaaggtcaagatatgatctgtatctatgtggctatcggtcaaaaagagtctacagtacgtacacaagttgaaactttgcgtaaatacggtgcccttgattatacaatcgttgtgacagcttcagcatcacaaccatctccattacttttcattgctccatatgcaggagtagcaatggctgaggaattcatgtataacgggaaacacgttttgattgtttatgatgatttatcaaaacaagccgtagcttatcgtgaactttcgcttcttcttcgccgtcctccaggtcgcgaagcttacccaggggatgttttctaccttcatagtcgtcttttggaacgttcagctaaagtatcagatgctttaggtggaggttcgattacagcgcttccgttcattgaaacacaagcaggtgatatctcagcatatattgctacaaacgttatttcaattactgacggccaaattttcttgcaagaaaatctctttaactcaggtattcgtccagcgattgatgcaggttcatcagtatctcgtgttggtggtgcagcgcaaattaaagcgatgaagagagttgcaggtacgcttcgtctagatcttgcttcttatcgcgaacttgaggcattcactcaatttggttcagaccttgatgcagcaacacaagcaaaactaaatcgtggtcgtcgcacagtggaagtgttaaaacaaccattacacaaaccattaccagttgagaaacaagttgtgattttatatgctctaacacatggattccttgatgatgtacctgtaaatgatattttagcttttgaagaagctttgtatgattactttgatgctcattatgataatctcttcgaaacaatccgcacaacaaaagatttaccagaagaagcagaattagatgctgctattcaagcatttaaagatcaatcacaatttaaataataggagggttctaatatggcaggctctcttagtgaaattaaagacaagattctctctacagaaaaaacaagtaagattactagtgcgatgcagatggtctcatctgctaagttggttaaatctgaacaagctgctagagattttcaagtgtatgcctctaaaattcgtcaaattactactaacctcttaaagtcagacttagtatctggatcagataaccctatgttatcttcacgtccggtgaagaaaacaggttatattgttattacttctgataagggtttagttggtggttacaattcaaaaatcttaaaagcgatgatggacactataactgactatcatactgagaatgatgattatgccatcatttcaattggtagtgttggttctgattttttcaaagcacgtggaatgaatgtttctttcgaattacgtggtttagaggaccaaccaagttttgatcaagttggtaaaattattgctcaagcagttgaaatgtacaaaaatgagttgttcgatgaattatatgtttgctacaatcaccatgttaacagtttaactagccaagtcagaatgcaacaaatgcttcctatcaaagaattggatgcagaagaggcttctgaggatagagtgattactggttttgaacttgagccaaaccgtgaagttatattggagcaattattgcctcaatatactgagagtttgatttatggagctattattgatgctaaaacagcagagcatgcggctggtatgacagctatgcagactgcaactgataatgctaaaaatgttatcaatgatttaactattcaatataaccgcgctcgtcaagcagctatcacacaggaaattacagaaattgttgcaggtgctaatgcacttgaataattaattagtctatagaaaaaatagtgaacaaaggtattttaaatcctttgtatcatatgataaggagaaatacatgagctcaggcaaaattgctcaggtagttggacctgtcgttgacgttgtatttgcaagtggcgacaaacttcctgagattaataatgcattgattgtctataaaaatggcgataagtcacaaaaagtagtacttgaagttgctcttgaacttggtgacggcctcgttcgtacaatcgctatggaatcaactgatgggcttacacgtggtttggaagtattagatactggtcgcgcaattagtgtgccggttggtaaggatactttgggtcgtgtcttcaacgttcttggagatgctattgaccttgaagagccttttgcagaagatgcagaacgtcaaccaatccataaaaaagcaccatcgtttgatgaattatcaacatcatcagaaatcttagaaactggtattaaagttattgacttattagcaccttacttaaaaggtggtaaagttggacttttcggtggtgcaggtgttggtaaaaccgttcttattcaagaattaatccacaacatcgcccaagaacatggtggtatttcagtatttactggtgtaggagaacgtactcgtgaagggaatgacctttattgggaaatgaaagaatctggcgttattgaaaaaacggctatggtctttggtcaaatgaatgaaccaccaggagcacgtatgcgtgtggcacttactggtcttacaatagctgagtacttccgtgatgtagaaggacaagatgtgcttctcttcattgataatatcttccgtttcacacaagctgggtcagaagtgtcagcgcttttaggtcgtatgccttcagccgttggttatcaaccaacacttgctacagaaatgggacaattacaagagcgtatcacttcaactaaaaaaggttctgttacatcaatccaagctatttatgtgccagcagatgactatactgaccctgcgccagctacagcctttgctcacttagattcaacaactaaccttgaacgtaaattgacacaaatggggatttatccagccgttgacccattagcttcaagttctcgtgcactcacaccagaaatcgttggagatgagcactatgaagttgcaacagaagtacagcgtgttcttcaacgttaccgtgagttacaagatatcattgcgattttaggtatggatgaattatcagatgaggaaaaaacgttagttggacgtgcacgtcgtatccaattcttcctttctcaaaacttcaatgttgcagaaacatttactggtcaaccaggttcatatgttccggttgaagaaactgttcgcggattcaaagaaatcctagatggtaaacatgatcaaattccagaagatgccttccgtatggttggtggtattgaggatgttatcgcaaaagcagaaaaaatgaactattaatgaggtgatgctatggcacaattgactgttcaagtagtaacaccagatggtattagatatgaccatcacgctagtctcattactgttagaacgccagatggtgaaatgggaattttaccaggtcacataaatttgattgctccccttaatgttcatcagatgaagattaatcgttctcatcaagaaggtgtagactgggtagctgttaatggtggtataattgaagttaatgaggatcaggtgacaattgttgcggattcagcagaacgagcacgtgatatagaccttaaccgtgcagaacgggctaaggaacgcgctgagcgtgcattagaaaaagctcaaacaactcagaatattgatgagatgcgtagagctgaggttgctcttcgtcgcgcaattaaccgtattagcgtcggtaaaaagtagaaaaatggtctaattagttttgtgactaattaggcttttttagtgtataatagaaggcatgaatatgatattaaatatagtaactatagttagtaattttatttttattgcccttttttatcaactttttgtagatttatttgactggtctaaaatgattaaaatgtcccctcaaaacatctcaaaattaaaagtttttattttgttgataagtatagttggtggctatgtggttagtcattttttattggaagtgattcagttgtgtcaatcaatcttttgggctctccaataaaggaaatattagctgaactatgatataatcaacttactattgttataagaatggagattcaaatggataaaattattgtggaaggtgggcaaacgcagcttcaaggtcaagttgttattgaaggagctaaaaatgcagttttacctcttttagcagccacaattttaccaagccaagggaaaacattgttgaccaatgttcctatcttgtctgatgtatttacaatgaacaatgttgttcgtggtttagatattcaagttgactttaattgcgataaaaaagaaatcttagtggatgcctcaggtgatattttagatgttgcaccttatgaatttgttagtcaaatgagagcttctattgttgttttgggacctattttagctagaaatggccatgctaaggtttcaatgccaggcggttgtacaattggtagccgaccaattgaccttcatcttaaaggtttagaagctatgggagctacgattacacaaaatggtggtgatattactgcccaagctgaaaagcttaagggagctaatatatacatggattttccctcagtcggtgccactcaaaacttaatgatggctgctacacttgcttcaggcacaacaacgatagagaatgctgcacgtgaaccagaaattgtagaccttgcgcagttactaaataaaatgggagctaaagtaaagggtgctggtacggaaacattaacgatcattggtgttgatgctttacatggtacagaacatgatgttgtccaagatcgtattgaagctggaacctttatggtggcagctgctatgacttctggaaatgttctagtaaaggatgctatttgggaacataaccgtcctttaatctctaaattgatggagatgggtgttgaagtgtcagaggaagaagatggtattcgtgtaaaagctgatactaaaaaattgaagccagtgactgtgaaaacactccctcatccaggatttcctactgatatgcaagctcaatttacagctctaatggcagtagttaatggcgaatcaactatgattgagacagtttttgaaaatcgttttcaacatttggaagaaatgcgtcgcatgggattacaaacggaaattttacgagatactgcaatgattcatggtgggagagctttacaaggtgcaccggtcatgtctactgacttacgagctagtgcagctttaatcttggcaggaatggttgcgcaagggcaaacagtagttggccaattaacccatttagaccgtggttattatcaattccatgaaaaattagcggctcttggtgctaatattaaacgtgtaagtgaggcgtaatatggcatctagtggttggaaatatgtattaaaacaaatcggtctaatagtattagtcatactattagccttgctgtttttagcggttggattgatgttgggttatagtgtttttggtgacggagagcatgcttactctattttatcgctggataaatggcaaaatattattggaaaatttttaggaaaatagaaagagccactataagttatttgatgcttatagtggtttcctttgagagttaattttagcagtagaataatacaatgacaaaaaaacaaaaacaaataacagcttcgattgtaactttgcttttttcattactggcaatagggttaggtgaaagcaaatctttgcctaatgatcacattttaaaacaggtgacagatttaattattagtaatgaatctggcaaaaatacttcccttaaaaatgtatcaggaactcctagtagagagttatctgaatctgttttgactagcaatgttaaaaaacaattgggaacaaatatagcttggaaccagtcaggtgcttttatcattaatcaaaataaaacagatttgaatgctaaagtgtcaagtgcaccatatgctattaatgaaataaagaaggttaataaccaaattgttccgactaaagcaaatgccttattaacaaaagcaactcgtcaatatcgaaatcgagaagaaacagggaatggtagaacttattggaaaccagctggatggcatcagataaatggattaaaagggagctataaccacgctgtggacagaggccatttaattggttatgctttagtagggagtttaagaggatttgatgcctccacaagtaatcctaaaaatattgccacacaagcagcttgggcaaaccaagctaatagcaaccaatcaacagggcaaaattattatgaaactttagttcgtaaagcattggatcgtcataaaactgttaggtatcgtgtgactttaatttatgacagagataatcttttatcttcgggatcacatattgaggctaaatcttcagatggaagtttagaatttaacgtttttattcctaatgtacaatcgggattattatttgattatgcaacaggaaaagtgaagcagacaaagtaatctttatctaatagtgcttgttaaagactgaaaaatttgataaaatagtctttaattgaatagaggtctgtgagactagtaaaccaagggaagctgcttagggagttcagccgtgactgcaagctgaatcagtgaaagagggtggaattcactcacaaataggactataattaaggtctgattggtcgatcagatagaaaacggatggtaccgcgtgtcaacgctccgattaaggggtagtggcacgcttttttttgttttcaaagctacttattttgacttggaggaaagatggatttacaaaaacaattagaagagttgaaaatatcaactcaagaaaagcttaaagaaatgactgggaaccacactaaagaattacaagacttacgtgtacaagttttaggaaaaaaaggttctctaacagaattactaaaaggtctgaaagatttatctaatgatttacgaccagttgttggaaaacaagtcaatgaagtacgtgatattttaacaaaagcgtttgaggaacaagctaaagtagtggaagctgcgaagattcaagcacagttagagtctgagagtgtcgacgttaccttgcctggtcgtcaaatgacattaggtcaccgtcatgtcttaacacaaactagcgaagagattgaagatatctttttaggtatgggattccaagtggttgatggttttgaagttgagaaagactactataattttgaacgaatgaatttaccaaaagatcatccagcccgtgatatgcaagatactttttatattacagaagaaatcttgctacgtactcatacttcgcctgttcaagcacgaacaatggaccaacatgatttttctaaagggcctttaaaaatgatttctcctggacgtgttttccgtcgtgatactgatgatgctactcatagccatcaattccatcaaattgaaggcttagttgttggagaaaatatttcaatgggcgatctcaaaggaacacttcaactgatttctcaaaaaatgtttggagcagagcgtaaaatccgacttcgtccttcatatttcccattcacagaaccttcagttgaagttgatgtctcttgcttcaagtgcggaggtaagggatgtaatgtctgcaaacagacaggttggattgagatattgggtgctggtatggttcacccaagtgttttggaaatgtctggtattgattctgagaaatactccggttttgcctttggtttaggtcaagaacgtattgcaatgttacgctacggtatcaatgacattcgtggcttctatcaaggtgatgttcgcttcacagatcaattttaagattttagatagcaagtagcatcattggtgtgatgataaatttatgttaacgctattaccttactcaataggaggttttctaatgtctcaaattacttttaaaaaggttggccttgataatgtgaatattttacagaatattgctatagaaacctttcggcagacgttttctcatgataatagtgaggaacaacttcaagcatttttcaatgagtcttacactttaccagtattaaaatcggaaattacccatgctgaatctgatacttattttgtttatcttgatacagatttagtgggttatttaaaagtaaactggggaagtcagcaaactgaaaaagatcttgataaagcatttgaaattcaaaggatttatcttctagatgcctaccaagggcaaggtataggtaaggctactttcgaatttgctttggatttagcttataaatcaggcttagattgggcttggttaggtgtttgggagtttaatcataaagctcaggcattttacgctaaatacggatttgaaaaattttctgagcaccaattttcagtaggtgataaagtggatacggattggttattaagaaaaagtttacactaaaaactacaaagcacttgtataaaaataaaagaaaataaatagagagaaattacatgttagtatcgtataaatggttaaaagagttagtggatgttgatgttacaacagcagaactagctgagaaaatgtcaaccactggtattgaggttgaaggtgtggagacaccagcggaaggtttatcaaaattagttgtaggtcatattgtttcgtgtgaagatgttccagatacccacttacatttgtgtcaagttgatacaggggatgatgaacttcgtcaagttgtctgtggtgctccaaatgtcaagactggtattaatgttatcgtagcggttcctggtgctcgtattgcagataactataagattaaaaaaggtaaaatccgtggtatggagtcacttggaatgatttgttcacttcaagagttgggcttatcggaaagtatcattccaaaagagttttctgatggtatccaaattttacctgagggagctatacctggtgatagtattttctcttatcttgacttagatgatgaaattattgaattatcaattacaccaaaccgtgcagatgctctttcaatgcgtggtgttgcccatgaggtagcagcaatttatgggaaaaaagttcattttgaagaaaaaaatctcattgaagaagcagaaagagcagctgataagatttctgttgtcattgaatcagataaagttttatcttactcggctcgtattgttaagaatgtaacagttgcaccaagtccacaatggcttcaaaataaactgatgaatgctggtatacgtccaattaataatgttgttgatgtgacaaactatgttcttttgacttatggtcaaccaatgcatgcttttgattttgataaatttgatgggacaactatagtagcacgtaatgctgagaatggggaaaagttaattactcttgatggtgaagagcgtgacttaatagctgatgacttggtcattgcggtaaatgatcaaccagttgctttggcaggcgttatgggaggacaatcaactgaaattggtagttcttctaagacagtggtccttgaagcggcagtatttaatggaacaagtatccgcaaaacaagtggaagactcaaccttcgttcagaatcatcttctcgctttgaaaaaggtatcaattatgatacagtttcagaggctatggattttgcggctgcaatgttacaagaattggcaggtggtcaagttctttctggtcaagttacagaaggagttcttccaactgagccggtagaggtatcaacgactcttggttacgttaatactcgtttgggaacagaacttacctatactgatattgaagaagtatttgaaaaactcggctttgctatttctggttcagaagtgaaatttactgtgttggtaccgcgtcgtagatgggatattgccattcaagctgacttagttgaagagattgcccgtatttatggttacgaaaaattaccaacaacattgccagaagccggagcgactgcaggagaattaacgagtatgcaacgcttacgtcgtagagtccgtacggttgctgaaggagcaggattatctgaaattatcacctatgctttaacaactccagaaaaagcagtgcagttctcaactcaagcaactaatataactgaacttatgtggccgatgactgttgatcgctcagcacttcgccaaaatgttgtttcaggaatgcttgatacaattgcttataacgttgctcgcaaaaacagtaaccttgcagtttatgagataggaaaagtttttgaacaaactggtaatccaaaagaagatttaccaactgaagtagagacgtttacttttgccttaacaggtctagtagaggaaaaagatttccaaacaaaatccaagccagttgatttcttctacgccaaaggtattgtagaggcgctctttattaaattaaaattagatgttacttttgtagcacaaaaaggtttagcaagtatgcacccaggtcgtacagcaactatcttattagatgggaaagagattggttttgttggtcaagtacacccacaaactgcaaaacaatatgatattcctgaaacttatgttgctgaaatcaatctatcaactattgaaagtcaaatgaaccaagcgttgatttttgaagatattacgaagtatccgtctgtatctcgcgatattgcattattacttgcagaatctgttagtcatcatgatattgtgtcagcaattgagacatcaggggtaaaacgtctaacagcgattaaactgtttgatgtctacgctggaaataatattgcagaagggtataaatcaatggcttatagcttaactttccaaaaccctaatgacaatctaacggacgaagaagtggctaaatatatggaaaaaatcactaaatcactcgttgagaaagttaatgcagaaataagataatttatattttacgttgaaaaataaataaaaaacagcatcaattaagatgctgtttttttatttaaaatttatagatgttctacggagaaagtatcaccgtgttggatgtcaccatattgaaagcctttgttaaaccaacgttggcgttgttcagctgttccatgggtaaagctatcaggcactaattttccgtaggtttctttctgaagggtatcgtctccgacggcgtgggcagcattcatggcctcttcaaagtctccttgttctaagagattttttcccctgatgtagtgagcccatacccctgcataataatctgcttgaagttctagccgaacatttaaagcatttgcttctttcttagtaagtccgtgtcgcattctattatacttatccataatgcctaactctgtttgaatgtggtgaccaacttcgtgggcgatgacgtaggccatagcaaaatcaccagtagcaccatatttatgtgataattcattgtaaaaagaaatatcaagatagatttttttatctgctgaacaataaaatggtcctgaagcagattcacctataccacaacctgtttgaattgaattggtgtaaagaacaagttttggttccttataatttccaaaaccttgggtttggaattcttgtgaccagaaatcctcagttgagccaaggactttattaacgaaatcgatttgttctctcgttgcgctattatcaacagaacgtgagacattctgagattggtaactagaaggtgaggatgagtcattaaaaatgctggttagtccccctccgccaagtagcagtaagatgattaaaaccacaagcttggttttccaactccctcgcagcaataaaagttgaagaatcggtaatccacttcctccgctagagaatgaacctccgctactggagcgacgatcttcaacattgtcgctttttcttaggtcatctattttcataagtatctccaaagtgttttataggctcattataaactattttaataagaaatgcttgaatttttaactaaatatcttcccctagatttgaagctatttttggtataatattaataaactgtaaaggataagttgaagaaggtttacttctcagttgacttataagataggagattcatgaaattactttatactgatattaatcatgatatgacagaaatcttagtcaatcaggccgcgcatgctgctgaagctggatggcgtattttttatattgctccaaactctttatcttttgaaaaagagcgtgcagtattagagaaccttcctcaagaagcctcttttgctattacaattactcgctttgctcaattggcacgttattttactttaaaccagcctaatcaaaaagaaagtttaaacgatattggattagcaatgatcttttatcgtgctttagcaagttttgaagatggacaattaaaagtttttggacgattgaagcaagatgcttcctttatcagtcaattggtagacctatacaaagaattgcagacagcaaatctgagtattttagagttaaaatatttacattctcctgaaaaatttgaagatttattagctatttttctagtggtttcagatcttttaagagaaggagaatacgacaatcaatctaaaattgccttttttacagaacaagtaaggtcaggccagctagatgtggatttaaagaacactatccttatagtcgatggttttacccgtttctcagctgaagaagaagctttaattaaaagtctgagttcacgttgtcaagagattatcatcggagcttatgctagccaaaaagcgtataaggctaactttactaatggaaatatttattctgcaggggttgattttttaagatatctagcaacgacatttcaaacaaaaccagaatttatcttgtccaagtgggaaagtaaatctggttttgaaatgatttcgaaaaatatcgaaggtaaacatgattttacaaatagtagtcacattttagacgacactgctaaagattgtataacaatttgggagtgcattaatcaaaaagatgaagtggaacatgtggctagagctatacgtcagaaactttatcaaggatatcgctacaaagatattttagttttactaggagatgtagatagttataaactacaattaagtaagatttttgagcagtatgatattccttattatttcggtaaagctgaaacaatggctgcgcaccctttagttcattttatggattccttgtctcgaataaaacgttatcgatttagagctgaagatgttttaaatctttttaagacaggtatttatggagagattagccaagatgatttagattattttgaggcttatatctcatatgcagacattaaaggtcctaagaagttctttacagattttgttgtgggggctaaaaaatttgatttagggcgtcttaacactattcgtcagtccctccttactccactggaaagttttgtgaaaacgaaaaaacaagacggtataaaaacactcaaccaattcatgtttttccttactcaggtaggtttgagtgacaatttatcgcgattagttggtcaaatgtctgaaaatgaacaagaaaaacatcaagaagtttggaaaacatttacagatattttagagcagtttcaaacaatatttggtcaagaaaaattaaatttagacgaatttttatcgttattaaattcaggtatgatgcaagccgagtatcgtatggtccctgctactgttgatgtggttactgttaagtcttacgatttggtagaaccacatagtaatcaatttgtctatgccctaggcatgacacaatcacattttccaaagattgctcaaaacaaatctttaatatctgatattgaacgtcagcttataaatgatgccaatgacactgatggtcattttgacattatgacgcaagaaaatttgaagaaaaaccattttgctgccctctctctttttaatgctgctaaacaagaattagtgttgactataccacaattattgaatgagtctgaagatcagatgtcaccatatcttgtcgaactaagagatataggtgttccttttaatcataaaggacgccaatcgttaaaagaagaagctgataatattgggaattacaaagctttattatcgcgtgttgttgacttgtatcgctctgctattgacaaagagatgactaaagaagaacaaactttttggtcagttgctgttcgttatttgcgtcgtcaattaacttctaaagggattgagataccaataattacagatagtcttgatactgtgacagtttcatcagatgtgatgaccagacgcttcccagaagatgacccacttaaattatcctcatctgctttgacaactttttataataatcaatataagtattttttacaatatgtgttaggtttggaagaacaagactcaattcatccagatatgcggcaccatggaacgtaccttcatcgtgtttttgaaattctgatgaaaaaccaagggatagaatcttttgaagagaaactcaactctgcaattaataaaaccaatcaagaagatgttttcaaatccttgtattcagaagatgcagaaagtcgttattctttagaaattttagaagatatcgcgcgtgcaactgcaaccatattacgacaagatagtcagatgactgttgaaagtgaagaagaacgatttgaactaatgattgataatactataaaaattaacggtattattgaccgtatcgatcgtttatctgatggttctttgggtgtcgtggactataaatcaagcgctcaaaaattcgatatccaaaaattttataacggtctaagtccacaattagtcacctacattgatgctatcagtcgtgacaaggaagttgaacaaaaaccaccgatttttggagctatgtacttacatatgcaggaacctagacaagacttgtctaaaattaaaaatttagatgatttagtaacaaaaaatcatcaagctttaacttataaaggattattttcagaagccgaaaaagaattcttagcaaatgggaaataccatctcaaagattccctttattcagagactgaaattgctattttacaagcacataaccaatcgctttacaaaaaagcatctgagactattaagtcaggtaagtttttgatcaatccatatacagaagatgctaaaacagttgacggagatcagtttaagagtattacgggattcgaggcggataggcatatggcacgtgccagagcgctttataaattacctgctaaggaaaaacgtcaaggtttcttaacattaatgcagcaagaggaggaaaatgatgacctttaagcctttcttaaatccagaagatattgctgttattcagacagaagaaaaaaattctgataaaaaacaaaagcgaacgcctgaacaaattgaagccatttatacttttggtaacaatgtcctggtatcagcttcggctggttctggaaagacttttgtaatggttgagcggattttagataaacttttaagaggggttccgattgactctttgtttatctcaacatttacagtaaaagcggcaggtgagctcaaagaacgtttagaaaagaaaataaacgagtctttgaaatccgcagaatcagatgatttaaaacagtttctcacccagcaacttgtcggcattcaaacagctgatattggtactatggatgcttttacgcaaaaaatagttaaccaatatggttatactttgggcatatcacctatatttaggattttacaagataaaaatgagcaagacgtcataaagaatgaggtctatgctgatttattttctgactacatgactgggaagaatgcagcttcattcataaaattagtcaaaaatttctcaggtaatcgtaaagatagcaaagcttttcgagaaatggtttataaagtttatgcttttagccagtccaccgataaccccaagcgctggatgcaaacagtttttctaaaaggtgcacaaacttacactgattttgaagctattccagatcaagaagtttcaagccttttaaatgtaatgcaaacaactgctaatcaattacgtgatttaacggatcaagaagattataagcaattaactgctaaaggggttccgacagcaaattacaaaaaacaccttaaaataattgaaaatttagtccattggtctcaagactttaatttgctgtatggaaaaaaaggattgactaatttggcacgtgatatcactaatgtgattccttcaggcaatgatgttacagttgctggcgttaaatatcctatctttaaacaattgcataatcgtatcgttggacttaagcacttagaagttatttttaagtatcaaggagaatctcttttcttgttagaattattgcaatcctttgttttagatttctcagaacaatatttacaggagaagattcaagaaaatgcttttgaattttctgatattgcccattttgcaattcaaatattggaagaaaatcatgatattaggcaactttatcaagataagtatcatgaagtaatggttgatgagtatcaggacaataaccatacccaagagagaatgttagaattattgtctaatggacataatcgtttcatggttggagacataaaacaatcaatttaccgttttcgtcaggctgatccacaaatttttaatgataaatacaaagcttaccaagacaatccaagtcaagggaaattaattattctgaaagagaattttcggagtcaatcagaggttttagacagtacaaatagtgtgtttacacatcttatggatgaagaagtaggagacattctttatgatgaaagtcaccaattaaaagctggtagtccaagacagcaagaaagacatccgaataataaaacacaagttttactattagatactgatgaagatgatatagatgacagtgatagtcaacaatatgatattagcccagctgaagcaaagttagtcgcaaaagaaattattcgattgcataaagaagagaatgttccctttcaagatatcaccctcttagtttcttcaaggacaaggaatgatggtatcttacaaacttttgaccgttatggtattcctttggtaactgacggtggggagcaaaattacttaaaatcagtcgaagtgatggtaatgcttgatactttgcggtcaattgataatcccttaaatgattatgctctagttgctcttttgagatctcccatgtttggctttaatgaagatgatttaacaagaattgctattcaggatgtcaaaatggctttttatcataaagtgaaattgtcttatcataaagaaggtcatcatagtgatttaattactccagaattatcttctaaaatagatcactttatgaaaacattccagacttggcgtgattttgctaaatggcattcgctttatgatttaatatggaaaatatataatgaccgtttttattatgattatgtaggagctctgcctaaagctgagcaacgtcaagccaatctatatgccttggcacttcgagcaaatcagtttgaaaaaacaggtttcaagggtttatcacgctttattcgaatgattgataaagttttagaaaatgaaaatgatttggcagatgttgaggtggcattaccgcaaaatgctgttaacctaatgactatacacaaatcaaaggggcttgagtttaagtatgtatttattttaaatattgataagaaattttcaatggtagacataacttcccctcttattttaagccgaaatcaaggaattggtattaaatatgttgctgatatgcgacatgaactcgaagaagagatactgcctgcagtaaaggttagcatggaaacacttccttaccaacttaataaaagagagttacgcttagctactttatcagagcaaatgcgtttactttacgtagctatgacacgtgcagagaaaaaattatatctggttggtaaggctagtcaaaccaaatgggctgatcattatgacttagtatctgaaaataatcatctcccattagctagtcgtgagacttttgtgacctttcaagattggttactggctgttcatgaaacctataagaaacaagagttgttttatgacatcaacttcgtatcattagaggaattaacagatcaccacatagggatggttaaccctagtctacctttcaatcccgataataaggtagagaatcgtcagtctgaagatatcgtgcgtgcgattagcgtgttagaatctgttgagcagattaatcaaacttataaagcggctattgagttaccgacagtgagaacaccaagtcaagtcaaaaaaatctatgagcctattctagatatagaaggtgttgatgtgatggaaactattactaaaacatcagtagattttaagttacctgatttttctacaagtaaaaagcaagacccagcagctttaggatctgctgtacatgaattaatgcaacgcatagagatgtcatctcatgtcaaaatggaagatattcaaaaagctttgacagaagtgaatgctgaaacaagtgtcaaagcggctattcagattgaaaaaatcaactattttttccaagaaacctcactcggtaagtatatacaagaagaagtagaacatctgcatcgagaggcaccttttgccatgttaaaagaagatccggagagtggtgagaaattcgttgtacgtggtattattgatgggtatctactattagaaaatcggataattctatttgattataagactgataaatttgtcaatcctctagaattaaaagaacgctatcagggacaaatggctttatatgcagaagctttaaaaaaatcttacgagatagaaaagatagacaaatacttaattcttttaggtggtaaacagctagaagtggtaaaaatggattaaagaaaggaaaaaatgatagtcgaacaaaaatttggaaatggttttacttggattaacattgaagcagagcaattgcgaacagaaacatcggaaattcaagcaaaatatttggatagtgagattattacatatgctctggatgattatgaacgagcctttatggaatgttctcatattaaaggaaaagaagtcttgacgattatttttaatactattgatctaaagcagaaagaaagttattatgagaccgttccgatgaccttttgcttatcacacgaccgtttgataacggtgacacggtctcgaaatagttatatgctagaactattgcaaaaatatctagaccgtaatccagatgtctctcctaaaaaatttttatttgcagctttaactttgattacaaaacaatattttaatgttgtatcgaaaattgatagagaaaaggatattctcaaccgtcaattgagagaacaaacaaccaataagcgcttattagccatgagtgacctagagacaggatccgtttatcttttgacagctgccaatcaaaatgcattggtattagagcaattagatgttcatcctagtcagcgatttaattctgaagtggaaaaagaacagttatcagatgctctcattgaagcgcatcagttagtcagtatgacacaattaaacagtcaggtactttcacaattatcatctacttttaataatgtcttaaataataacttgaacgaaaacttaacaggtttgaatatcatttcgattaatttagcgattattgcagcaattactggcttttttgggatgaatattccattacctcttacagaatcacggagttcatggttaattgttattgctacttcggtcttactttgggttattattgctcaaattttaaaacgagtttttaacttaagaaaataaaaatattcggtgcttacgcaccgaatatttttttatttacctaagcagaattggctgaagagctgagttattagttcatctggagctgcatccccagtgatttctccaagtatttcccaagttctagtcatatcgacttgtaagagatcaacaggcattcctaattccaagccctcattgacagcttttaaactatcaacggctttttcaattagtgagatatggcgagcatttgatagataagtagcgtcatgttctaccataccagcgttgtcaaagaaaatatcgttaatacgttcttcgattttatcgatgttttcattttctaaaaccgaaattggaataacatttttaggtaattcgttaacttctattttttgaggaagatccgttttattgagtaatacgatacgattactttctttacttagttctagaagggagcggtcttgtaatgttagtggttcggaactattgagaaccaacaacacaaggtcggcttcttctaaagccttctttgaacgttcaacaccaattttttcaacgatatcatctgtatcacggataccagcagtgtcaactagttttaaaggaactcctttaatattgacgtattcttcaataacatcacgagttgttccttcaatatctgtcacaatcgccttttcttcacgtaagaggttatttagtaagctggatttaccgacatttggacgaccaatgattgctgttgaaagtccttctcgaagaatttttccacgtctggcagttcgaagtaaattttccataagtgcttgaaactcttgtgttttttcacgcatcagtgttgtagtcatctcttcaacgtcatcatattcagggtaatcgatattaacttcaacttgggctagagtatttaaaatttcttgtcgagtgttattgattagtgtctttaaagaaccatctaattgcttaacggcaatatccattgctttatctgttttagctctaataagatccataacagcttcagcctgagtcaagtcaactcgaccatttaaaaaagcacgtttagtaaattctcctggttcagccattcgtgctccatgtcgtaaaattaactgaagaatttcgttagtaactgcaattcctccatgcgtattaatttcaataacatcttctcttgtgaatgtttttggagcaagcataacgcctaacataacttcatccaagatttcatttttatctgggtccacaatatgaccatagtttaaggtatgggattggatcgcggatagatcttttccacgataaatttttgatgctatctttaaggcatctgtaccagatatacggacaataccaatagctccctcaccgagaggagttgaaatagctgcgatggtatcaaattcttttgtaatagacataaagtctctctctttcttggaaattactaacattcattgtaacctaaagccctaaaaggtgcaatcatttgattaaaagagaagatttccataatggttttatttgaaggtatgctataataaaactatgattatactacaaggaaacaaaattgagcgctcattttcaggtgatgtgctttttgataatattaatattcaagttgatcaacgtgatcgtattgctcttgttggacgtaatggtgctggcaaatcaacgcttcttaaaattttagttggtgaagaggctccgacaaaaggagaaataaataaaaagcgtgatttgagtttgtcctacttggcacaagatagtcgttttcaatctgaaaatacaattttccaagaaatgttacaagtttttgactcattaagagaagtagagaagcgcttacgtgaattggaattacaaatggggcaagtttcaggaagtgacctggaacaattgatgaaaacatacgatattttgtcagaagagtttcgtgaaaaaggtggctttacctatgaatcagatataaaggctattttaaatggttttaagtttaacagtgatatgtgggaaatgcctattagtgaattgtctggcgggcaaaatacacgattagcgcttgcaaaaatgctacttgaaaagccagaattacttgttttagatgaaccaacgaaccatttagacattgatacgattgcttggttagaaaattatcttgtaaattatcaaggagcccttattattgtcagccatgaccgctattttttagacaaggtagctacagtaacttatgatttaacgacacattctctagaccgctatgtaggcaattattcgaaatttatggatcttaaggcagagaaaatagcgactgaagaaaagaattttgaaaaacaacaaaaagaaattgctaagttagaagattttgtacaacgtaacattgttagggcttcaaccactaaacgagcacaagctcgtcgtaaacaattagaaaagatggaacgactcgacaaaccgaatgtagagcaaaaatcagctaatatgacttttcatgctgggaaagtctcagggaatgttgttttaacacttgagaatgcagctattggttatgaaggtgtttctttatcggagccaatcgatttggacgtgaagaaatttgatgctattgcaattgtaggtccaaatggtatcgggaaatcaactttaatcaaatcgcttgttgggcaaattccttttatcaaaggagaagcaaaattaggagcaaatgtcgaaactgggtattacgatcaaagtcaaagtaatttaacaaaaacgaatactgttttagatgagttatgggatgctttttcaacaacgccagaagttgaaattagaaaccgtttaggagcttttcttttttcaggtgatgatgttaaaaaatcagtttcaatgctatcaggtggtgaacgagcgcgtttgctattggcaaaattatctatggaaaataataattttctcatattagatgagccaacaaaccacttggatattgatagtaaagaagtcttagaaaatgcactcatcgaatttgatggcacattactttttgttagtcatgatcgctattttattaatcgtgtggcaactaaggttctcgaaatttctgataagggaagtactctctatctaggagattatgattattacctcactaagaaagccgaactagaggaattagcacgtttaaatgaagaagaagtgagtgcttcaaaaacagaaatcgacgttacatcagattatgagacacaaaaagcaaatcaaaaggaatttaggaaaattacccgtcgcgttgtagaaattgaggcgcgtttggaagttcttgaaaatgatgaaaacaatatcaatggtttaatgttagaaaccaatgacatcggaaaactctctgatttgcaaaaagagctggaatcaatccaagaagaacaattgctattaatggaagagtgggaaaatctaaatatgagactagatttgtgagaaaatttcaaaaacaatagtttgtgaaaaaaagtacattttaaattgagatgccttttacgaaaacaaagaaagcggttcaaattcttgcatcttgtgaaaaaaacttatacaataattaagtaataaagatttttttggaggttagaatggtaactctatctaaagaacaacacttggatatgtttctaaaaatgcaacgtattcgtgatgttgatatgaaatttaacaaattggttcgtcgtggtttcgtccaagggatgactcacttctctgttggtgaagaagctgcttcagtaggtgctatccaagatttaacagattcagatatcattttctcaaaccaccgtggacacggacaaactattgcaaaaggtattgatattggtggaatgtttgctgaacttgctggtaaagcaacaggaacatcaaaaggtcgtggaggctcaatgcacttagcaaaccttgaaaaaggtaactatggaacaaacggtatcgtcggtggaggatatgcgcttgcagtaggtgctgcccttacacagcaatatgaaggaactgataacattgttatcgccttttcgggtgactcagcgactaacgagggctcattccatgagtcagttaacttagctgctgtttggaacttaccagttatcttctttatcatcaacaaccgttatggtatctcaacagacatcacatactcaactaaaattcctcacctttacatgcgtgctgatgcgtacggtattccagggcattatgttgaagatggtaatgaccttatggctgtttacgagaaaatgcatgaagttatcaattacgtgcgttcaggaaatggaccagctattgtagaggttgaatcataccgttggtttggtcattcaactgctgatgctggggtataccgtactaaagaagaagttgattcatggaaagctaaagatccagtaaaacgctaccgtgcatacttaattgaaaatgaaatcgctactgaagaagagcttgcagctattgaagcacaagtgattaaagaagttgaagaaggggttaaattcgctgaagaaagtccattccctgatatgtctgttgcatttgaagacgtttttgtggactaaaataacctaaagtagatgagatttatctcgttctattattcaattgattaaaaaacggatattcggaggaaataatgagcgaaactaaagttatggctttgcgcgaagcgattaatgtcgctatgagcgaagaaatgcgcaaagatgaaaaagtatttttaatgggtgaagatgtaggtgtatatggaggagacttcggtacatctgttggtatgttagaagagtttggtgctaagcgcgttcgcgacacaccaatctcagaggctgcgattgcaggttcagctatcggtgctgcacaaacaggtttgcgtcctatcgttgatttgacattcatggattttgtaacaatcgcaatggatgctatcgttaaccaaggtgctaaaacgaattatatgtttggtggaggtctatcaactccagttactttccgtgtggcatcagggtcaggtattggttcggctgcacaacactcacaatcattagaagcttggttaacacacattccaggtctaaaagttgttgcacctggtactgttaatgagtcaaaagcacttttgaaatcttctattcttgacaataacccagttatcttcttagagccaaaagctctctatggtaagaaagaagaagttaatatggaccctgatttctatattccacttggtaaaggggatattaagcgtgaggggactgacttaacaattgtttcttatggccgtatgcttgagcgtgttatgcaagctgctgaagaagttgctgaggaaggtattaacgttgaggttgttgatccacgtacacttattccgcttgataaagaattaattatcgattctgttaagaaaactggtaaattgatcttggttaacgatgcttataaaactggtggtttcactggtgaaattgcaactatggttgctgaaagtgaagcatttgattaccttgatcatcctatcgtgcgtcttgcaagtgaagatgttccagtaccgtattcacgtgtacttgaacaaggaatcttacctgatgtagcaaaaattaaagatgctatctataaagtagttaacaaaggtaaataattcataaaacaaagagggactgaggaatgagtgaaaacttagcctctttccttgtttataggttttaatttatatcgttagatgaaacatatatttgacgatatagtttagtgtgaaaggaaaactatggctgtcgaaattattatgcctaaactcggggttgatatgcaagaaggcgaaatccttgagtggaaaaaacaggtaggtgatgttgttaatgaaggtgacgtcctacttgaaattatgtcagataaaacaaatatggagattgaagcagaagactcaggtgttttactaaaaatcacacatgggaatggagatgttgttcctgtaactgagacaattggttatattggtgctgaaggtgaagaagtaacagaagcatcttcttctgaaaatacatcagttgaagaaaacgcgacacaagtaacttcagaaccagaaaaagttgaagaaacatcagaaccaagtgtgccagcagctacaagtggtgaaaaagtacgtgccactcctgcagctcgtaaattagcaagagagatgtctattgaccttgcactagtatctggaacaggggcaaatggtcgcgttcacagagaagatgttgaaaacttcaagggtgctcaaccacgtattacaccattggcacgtcgaattgctgaagatcaaggagttgatatagcagaaatcactggcagtggtattcgtggtaaaattgttaaaaatgatgttttggctgctatgtcaccgcaagcagcagaggctcctgtagaaactaaagctacaccaacaacagaagaaaaacaattaccagaaggtgttgaagtcattaagatgtctgcaatgcgtaaggctatttctaaaggtatgactaactcttacctcactgctccaagctttacacttaactatgacattgatatgactgaaatgatggctcttcgcaagaaattaattgatccaatcatggctaaaacaggcttgaaagtcagctttactgatttgattggaatggccgttgttaagacattgatgaaaccagagcatcgatacctaaatgcttcattaattaacgatgcacaagaaattgagcttcataattttgttaatattggaatcgcagttggtcttgatgatggtttgattgttcctgttgttcacaatgctgatcaaatgtcactttctgactttgttatagcatctaaagatgttattaagaaaactcaagaaggtaaattaaaatcagctgaaatgtcaggttcaacattctcaattactaacttaggtatgtttggtactaagacgtttaacccaattatcaatcaaccgaactcagcaatccttggagtaggagctactattccgactccaacagtggttgatggtgaaattgtagctcgaccaattatggcaatgtgtttaacaattgaccaccgtattgttgatggaatgaatggtgctaagtttatggttgatcttaagaacttaatggaaaacccatttggtttacttatttgattccgtaggtcttaatttgatataataagttattcgaaaaacgaaagaggaaataaaaaatggcttttgatgtaattatgccaaaacttggggttgacatgcaagaaggcgaaatccttgagtggaaaaaaaatgaaggtgacaccgttaatgaaggtgatgtccttcttgaaatcatgtctgataaaaccaatatggaaatcgaagcagaagacactggtgtacttttaaaaattgtacatcaggcaggagatgttgttcccgtcactgaagtgattgcctatatcggagaagaaggtgaagaagtaggtacgtcatcaccttcagctgatgcaactatcacagctgaagatggtcaatcagtttctggacctgctgctccttcacaagagacagttgcagcagcaactcctaaagaagaacttgcagctgatgagtacgatatcgtagtcgtaggtggtgggcctgcaggttattacgcagcaatccgcggtgctcaacttggaggaaaaattgccattgttgagaaaactgaatttggcggtacgtgtttgaatgttggttgtatccctacaaaaacatatcttaaaaatgctgaaatcctagatggtttgaaagtagcagctggacgtggtatcaaccttgcttcaactaactatgcaattgatatggataagactgttgcctttaaaaattctgtagttaagacactgactggtggtgtacgtggtctcttgaaagcgaacaaagttgaaattttcaatggacttggacaagtaaaccctgataagtctgttgttattggcgataaagttatcaaaggtcgtaacgtcgtccttgcgactggttctaaggtatctcgtattaatattccaggtattgaatcaccattagtattaacatcagatgatattcttgatttacgtgaaattcctaagtcacttgctgttatgggtggtggtgtcgtaggtattgagcttggtcttgtatgggcttcatatggtgttgacgtaactgttattgaaatggctgatcgcatcattccagcaatggataaagaagtatcgctagaacttcaaaaaatccttgctaagaagggaatgaagattaaaacatcagttggtgtttctgaaattgttgaagccaataatcaattaacgcttaaattaaacaacggtgaagaagttgttgctgataaagctcttctttcaattggacgtgttccacaaatgaatggtcttgaaaatcttgagcctgaacttgagatggaacgtggacgtattaaagttaatgcttatcaagaaacttcaattccaggtatctatgcaccaggtgatgttaatggaactcgtatgttagctcatgctgcataccgtatgggtgaagtagctgctgaaaacgcactcggcggtaataagcgtaaagcacatctagatttcactccagcagctgtttatactcatcctgaagtagcaatggtggggatgacagaagagcaagcacgtgaacaatatggtgacatattagttggtaaaaatagctttacaggcaatggtcgtgctatcgcttcaaacgaagcacatggttttgtaaaagtaattgctgaacctaagtataaagagattcttggtgttcacattattggtccagctgcagcggaattgattaatgaagcttctacgattatggaaaatgagttgactgtctacgatgtagcacaatctatccatggtcacccaacattctctgaagttatgtacgaagctttcttagatgttctcggtgaagctattcacaaccctccaaaacgcaaataattttgtttaatatatttgagattgagcttttatagcttcaatctcttttcacgtatatattgtctgaatattataaaatattagttaggaatttaaaatgaaatatatcgttaacacgtctaatgatccggcttacaatgttgctttagaagcttacgcctttcaaaagttgacagatatcgatgaaatctttattctttggattaatgaaccggctatcattattggacgccatcaaaatacaattcaagaaattaacaaagagttcattgataaaaatggcatccatgttgtccgtcgtttgtcaggaggcggagcagtttatcatgacttgaataatttaaactacactattatttctaataatacacaagaaggtgcctttgatttccaaactttttcaaaaccagttattgatactcttgctaaattaggtgttaaagcagaatttactggtcgtaatgatttagaaatcaatggacaaaaatttgcaggaaatgctcaagcttattacaaaggtcgtatgatgcatcatggttgtcttttatttgatgttgatatgtcagtcttagggcaagcactcaaagtatctaaagacaaaattgaatctaaagggataaaatctgtacgcgcacgtgttacaaatattgttgaccatctttcagataaaattacagtacaagaatttagcgatgccattttagctcaaatgaaggaagaatatccagagatggatgaatatgttttgagtgatgccgagttatcagaaatccaagctatgcgcgataatcaatttgctacatgggattggacgtatggtaaagcacctgaatacaccattgaacgtggtgtccgctatccagctggaaaaattacgacttatgctaatgttgaaaattcaacgataaaatctgtcaaaatctttggtgacttctttggagtgaaacctgtggatgatattgaaaaaatgttggagggtgtccgctacgattacaaagatgttttagcagcgcttaaaacagttgatacaagtcaatacttctcacgtatgacacccgaagagattacaaaagctattgtagactaaaatcaaaaaatctagtcaaagtcttcgcctttggctaggttttttgtatggttaagtgacgttatagtagtaaaaaaacaacgttattgataacgctggtttttatattattcaaaatctgcttttgatttaacgtctccgtattcttcaggaatctctaaagataaaatttcttcataactagggaggacaatctctttaccgtatttgttacggagggcagttgccacaagacggtaagctagattagcattacgagaaaggattggaccgtgaaagtatgacccaaaaacattcttataatgaaccccttcagtaccatcttctttgttattcccatttccataaatgacggttcctaaaggtttttcgtcttctgataaaaaggtacgtccttgatgattctcaaagccataatatgtttcattgaattcatcgttgtgaatcttgatatcaccaatatagcgattattattttggtttagcgtatagtgtcccataacgccaatgccctctattcgttctccattagcttgaatatagtattgtcctaaaagttggaaacctccacaaatagcaagtactacaccattattttgaatgaatttgttaatgtcttctttcttactgggaagatcgcgtgcaacaatggcttgttcgtagtcttgtccaccaccaaaaaatgccatctgataatagttgggatcaaatctatcttctaatgaaacgatatcaaatgtcatttgacatcctagtttttctcccacatatttcatcattaagatatttccgttatcgccataagtatttaataggttaccataaagatgagctacattaagagtgtatttataatctttggtagtaggagattttagtgaggtataagtcattaattcatctcctttctgatagcgttgtggttagcaagaatttcacgaaactccagcatagctgtatatgttgctaaaatataagcatgctcagtctcttgctgctcaatcattgtcataatatcttgcagtttatcagcttgttttatgcgtttctcatcataaccagttacacgtaagcgacgagcaatttcagagtggcgaacaccaccagcaaatatttctgggatattcatcgtgagaatagtttcaaaattagcgtcccaaatccaagaagtatcaataccgtcagcataattggcattcagtagtactgagagagagaacgggtatggagcaagtttaatcatatcaagagcttgactagctcctaccggatttttaatcagaactaaagtacattttttatttccaattgtaaaggtttcttgacgaccaaaaacggcacggcttttatcaaatccatccttaatttgacttggttctacaccaaaatattcagcaacagatactgccgccaaagcattgtaaatattataaaggccacccacgttgatattatattgttggccatcaataacgaaacctgatgaagtatttgtcagatgtgttagccttgttaaggcataatcaaggtttggacgttcaaaatcacaattaggacaagtgtagtcaccaaggttggcatatgtgttcaatcgataagttaaaattgcttgacactttggacagagaataccctcagtattatagtgtgctaatcgtggctcatgtttgtcggtattaaatccatagaattgcacagggttagtcacgcttttagaattaaaaagtggactgtcaccgttagctaagatagtagcttgcggagcgttagcagctccatctaaaatcatttgataagttgtgtagatttcgccataacggtccatttgatcacggaaaatattggtaaagacgaacaaactaggctttatatactgtgtaatacggggtaaactcgcttcgtctatttcaaggacagctatttttttaccagatttacttttcttagctgttaggaaggtcgaaacaatacctgtaatcatatttgctccacttgggttggttaccacctgaccgaaggcttcctttaaaataccaactgttaaagctgttgttaaggttttaccgttagtaccagtcacaactacaatttcataatctttggcaattgtatctagtatatctttatcgaatttgagtgctaaactacccggataagtagagccacgtcccattttacttaaaaggtaatgagcagacttaccggcagccactcctagtgctgtatttattttcataaagatattttatcataaaaagatgctttcttgctaaagaaaatattatgaaaacatggtataatgtagacgatggaaaataagaaatcaaggagttaagcaagaaactcttcgacaggctaccagtagagaggaagatatggatattttttcagctattgattcaaagttttgggcgagcattatggaaaatccatggatgatccttattcatctcatggatattatcatagtagctgttctgatttataaatttatcaaagcgctagcaggcacaaaaattatgtccttaattcagggcgttattttgtttatcatcattagatttgtgtcagaatggatagggctaacaacgattacatttttgatgaatcagattgttacttatggtgtaattgcaggtgttgtcatctttgctccagagattagaacaggtctcgaaaaatttgggcgaacaccacaactatttacgcaacgttctcaattaagcagtgatgaaaagctagtagatgcccttgttaaggcagttgcttatatgagtccgcgtaaaataggagccttgatttcaattgaacgtacccaaactttgcaagagtatatagctacaggtatcccattagatgcagatatttccagtgaattgttaattaatattttcattcctaatacaccactgcatgatggtgctgttattgtaaaagataaaaaaattgctacagcatgctcgtacttacctctatcagaatcatcttcgatttcaaaagaatttggaacacgccacagagcagcgattggtctatcagagaattcagatgcactaacagttattgtttctgaagagactggtggtatttctgttgctttgaaaggtgaatttttacatgatctttctaaagatagctttgaagcaattctgagaactcagttgattcaaaatcaagaggaaaactcaaaattagcttggtataatcaactattgaggaggaagtagacatgaaaaaattttttacaaataaattttggttaggcgttgtctcactctttctggctattttattatttttaacggcaactgcaacaagtatgaaccatcaagacaatagtaagattgcaggagcgtctgagacatatacacataccctaacagatgtgccaatagacatcaaatacgatagtgatgattactttattagtggatattcttatggggcagatgtctatatgtcatcggttaatcgtgttaagttagattctgaaataaatgaggatacacgaaaatttaaagtagtcgccgatttgacaaatatgaaaccagggactcacaaagtcccactaaaggtagtaaatttgccatctggtgtaaatgctacggtttctccaacaacaattacagtaactatgggtaaaaagaaaacaaaagagtttccggtttatggacatgttaatgataagcaaattaaagctggttatgcagtcgataagatgtcagttgatgtgtcaaaagttaaagttactagtgatgaatctattatagatcgtattgaccatgtcgctgccaatatccctgatgataaagttcttgatgatgattttaacaagacagttactttacaagctgtaacagcagatggtacagtattagcaagtattattcacccttctaaagcaactttatctgtcaaagtaaaaaaattgaccaagacagtaccgattaatttgataccagtaggacaattcagcgatagtatttcaaaaattaactacaagttgagtcaagaaaaagcagtaatttcaggaacaaaagaggctttagaagctatttctgttattaatgctgaggtagatatttcagacgtaactaaaaatacagaaaagaaaattaatctttctgcaaacaatgtttcagttgatcctgctcaagtaacagttcaattgacaactactaaaaaataatagataataaaaacgaaaaaaatggaggtagcgtttttcgctagaaaaaaattatgggaaaatattttggtacagatggtgttcgcggtgaagctaatgttgaactgacgccagaattggcttttaaattaggacgttttggaggatatgttctaagtcaacacgaaactgatcgtccgagagtttttgtagctcgtgatactcgtatttctggtgaaatgctggaatctgctttgattgctggtctactttcagtaggtattgaggtttataaacttggtgttttagccactcctggagtgtcttaccttgtccgtacagaaaaagctagtgcaggggttatgatttcagcaagccacaatccagcacttgataatggtattaagttctttggtagtgatggttttaaacttgatgatgatcgtgaattagaaattgaagctttacttgatgcgaaggaagacactttaccacgtccatcagcacaaggtttaggtactttagtagattatcctgaaggacttcggaaatatgagaagtttatggaatcaactggtattgatttagaaggtatgaaggttgcgttggatacagcaaatggagcagcaacagcctcagctcggaatatctttttagacttgaatgctgatataagtgttattggtgatcaaccagatggtttgaatatcaatgatggtgttggttcgacacatcctgagcaattacaaagtttagttagagaaaatggttccgacatcggtctagcttttgatggtgatagtgatcgtttgatcgctgttgatgaaaatggagagattgtagatggtgataaaattatgtttatcattgggaaatatctctctgataaagggcagcttgctcagaatacaatcgtaacaacggttatgtcaaatctcggctttcataaagcgctcgaccgtgaaggaattcataaagcgattaccgctgtaggagaccgctacgtggttgaagaaatgcgtaaatcaggatataatcttggcggagagcaatcaggccacgttattatcatggattacaatactacaggggatggacaattaacagccatccaattgactaaggtcatgaaagaaactggtaagaaattatcagagttagctagtgaagtgacgatttatcctcaaaaattagtaaatattcgtgttgaaaataacatgaaagataaagcgatggaagttcctgcaattgcggaaattattgctaaaatggaagaagagatggatggcaatggtcgtattctagtacgtcctagtggtactgagcctcttcttagagttatggcagaagcgccaacaaatgaagcggttgattattatgttgatactatcgcagatgtcgttcgtacagaaattggtttagattaaaacggcgttattctgctataaagtcgtcaatgttataaaataataaagagatggaattggagtggagcatcaagcatacgcctttctctctctttttgatttgagaagggagtttagagaaaatgactaaagaagcagaattattatgggctaaacacaagtatttagtcttaagtaaatctcagaaaatttatttggatattagacaaactttgaaatcaccaaattgtaccgttttagacgttcagtcactcattgaccaagcagtgcttttagaagaatcaccatcacaagtgactaatgcttatatgcatatatggggctattttaaaaataaggcagagcgtcaagaaaaagaagaatttttaaccttgctggaaaaatacaggaaaacaggttatcaacgaagaaaactgttagcttttctaaaacagctattagctaaatacccaaattcttatttacaaaactcttctattttcgaagaagagtaaaagattgatagttgaggtatataaatgagattatggcatcaagatattattgagttattgcctaggcagcaacttttaggacagcatagagagtgttgtgcattgagagggaatgggtgggggagaaaacatgagactgttgattatgtttttcgatattcaccttataggttatttgcatatcatcaattagttatggaagaaatgatggagcgtgggtatcgtgtatctaaagaatggctaattgcagaatataggggaatgaagtgcccaagatatgatacacttaatcctgttgacttggagacacctatctatcccgagcacaatcaagactatctacaagaatgtctatggaatttaaaagcaaaaggaattgaccttcctataaataagataaaatagagatttatctctattttattttggaataaaaagctatattatcaagttttagaggagtgtttttttaagggcaaagtggtaaaatagaaacatgttaaagaaaccaacctcagcatatgtacacattccattttgtacccaaatatgttattattgtgatttttcaaaagtttttattaaaaatcagcctgtagacgcttatcttcaggctcttatccgtgaatttcggtcttatgatattacagaattgcgcaccttatatattggaggagggacacctacatctataagcgctgtgcaactggactatttattgacggagttaagtagagatttaaacttaaatactttagaggagttcactatcgaagctaatccaggagatttaaccgttgataaaatagaggtgcttcaaaagtcagctgtcaatagagtttctctaggagttcagacctttaatgataaacatttaaagcgtattggacgcagtcacaatgaggcacaaatttattctacaattgatgctcttaaaacagctggttttcaaaatatctctattgacctaatttatgccttacctggacaaacgatggatgatgttagaagtaatgtagccaaagctctctctctaaatattcctcatttgagtttatatagtttaattttagaacaccatactgtatttatgaataaaatgcgtcgtgggaaattacatttgccaacagaagatttagaagccgagatgtttgaatatatcatttctgaaatggaaagaaatggttttgagcattatgaaatttctaattttacaaagccgggttttgaaagtcgtcataatttgatgtactgggataatgtagaatattatggtgttggtgcaggcgcttctggttatcttgatggtattcgttatcgtaatagagggccaatacaacattatctaaagggggtttcagaaggtaatgcaaggttatctgaagaagtattatcaaaaaatgaaatgatggaagaggagcttttcctcggtcttcgtaaaaaagagggtgtttccatcggaaaatttgaacaaaaatttggaacgtcctttgagaaacgttacggtcagattgttcaagaactccaaagtgatgggcttttgaaagaaaataatggttttatccagatgactaaaaaaggtctcttcttaggagatacggttgccgagaaatttattgtggagtaaaaaatgggtttattatatcgagaaacttacgaagtgcctttttatgaatcagacactaatcattatatgaaattaccgcagttgttggctttagcgttacaaatttcagccaaacaatctttaaaattaggaataggcgatgacatcgtttttaaaagatacggattggtttgggtcgttacagattatattattgatattgagcgtttacccaagcatgctgaaaagatagtcattgagactgaagccaaagctcataataaattattgtgttaccgctatttttatatttatggtgaagacgggcaaaaaataataacgatttcatctgcttttgtcttaatggattttaaaacacggaagattcatcctgttcttgatgatattacttcaatttaccaatcccaaagaatcaaaaaagttattcgagggccgaaatatcatcccattggagatagtaaagttaaacaataccatgttcgttattttgatttagatatgaatggacatgttaataatagtaagtatctagaatggatgtatgatgtgttggacttagattttctaagtagccacattcctaaaaaaattgatttaaaatatattaaggaaattcaatatggaacggatattaagtctcattggtatcaagatggtcttgtgacacgtcatgatattattggtggcgatgctattcatgctcaagctaggattgaatggcaggaaaaaaaggaggattaaatggcttataaaggatatcttattgatttagatggtactatttacaaagggaaaagtcgtatcccagcaggagagcgttttatcgaacgtttgcaagaaaaaggcattccttatatgttagtaactaataatacgactcgtacaccagaaagcgttcaggaaatgcttcgaggcttcaatgttgaaacaccacttgaaacaatctataccgcaactatggctacggttgactatatgaatgatatgaaccgtggaaaaacagcttacgttattggtgaagaagggcttaaaaaagctattgcagatgcaggttatgtggaggatacaaaaaatccagcctatgtggttgttggtttagattggaatgttacttatgataaattggcaactgctacgttagcaattcaaaatggtgctttatttattggaaccaatccagatttgaatattcctactgaacgtggtttattacccggtgctggctccttaaatgctttattagaagccgcaacgcgtataaaaccagtctttattggaaagccaaatgccatcattatgaataaggcacttgaaattttaaatattcctagaaatcaagcagtcatggtcggtgataattatttgacagatatcatggctggtattaataatgatattgatactttgttagtaacaacgggttttacaacagttgaagaagtaccagatttaccaattcaaccaagttatgttttagcaagtttagatgaatggacatttaatgaaggataagttattagtagttttaacttggatttggattatatcgttagcaactctagctacaatttatattgcttggttgatctatcctatagaaattcagtttttaaaattagaaaaggttgtgtatttaaaggctgaaacaatttattataattttaataagttgatgatatatctgactcatccttttatctctgatttaaatatgcccagctttccttcttcagaggatggtttaaagcattttgcggatgtaaaatatctttttactctagcgcatgggctttttgttatactaacttttccagttatttattttttaagacgtggatggaagcaaaaaagtatctttctatatgaaggctttttcaagatagctattatgttgcctatttttattgtagtatgtgcctttctgttgggttttgaccagtttttcactctatttcatgaggtgctttttccaggagattctacttggcaatttaatcctctaacggatccagtaatttggatacttcctgaaacttttttcctccattgtttcatcatttttttgttaatctatgaaacaataactataattcttttgataataggtagaaaacatttaaaattaagaaaatataaaaacaaaatgcaagccttataatagcgcttgcattttgtttgctatttttttataatacaaatatgagaaatgtcggaattataacaatgacataaaaaagcaccgaatcggtgctcactttttcaagctgaatacggactggattaaaaatcactgccttattttaacgtgctgtgctgtttcgaataattccaacaaaattattatatgttattttagtgtaataatcaagtaaaaaataaaaatcagcaaagctttaaaacttaaaacatactttaggatattttaacaaataacagatgaaagataaagataatgcttttaaaattcaaaaaaataatatataattaaagtatgttttaaaggtgttgtttttagaatggtgttttaaataaaaggagaaaagttatgaataagccatattcaataggccttgacatcggtactaattccgtcggatggagcattattacagatgattataaagtacctgctaagaagatgagagttttagggaacactgataaagaatatattaagaagaatctcataggtgctctgctttttgatggcgggaatactgctgcagatagacgcttgaagcgaactgctcgtcgtcgttatacacgtcgtagaaatcgtattctatatttacaagaaatttttgcagaggaaatgagtaaagttgatgatagtttctttcatcgattagaggattcttttctagttgaggaagataagagagggagcaagtatcctatctttgcaacattgcaggaagagaaagattatcatgaaaaattttcgacaatctatcatttgagaaaagaattagctgacaagaaagaaaaagcagaccttcgtcttatttatattgctctagctcatatcattaaatttagagggcatttcctaattgaggatgatagctttgatgtcaggaatacagacatttcaaaacaatatcaagattttttagaaatctttaatacaacttttgaaaataatgatttgttatctcaaaacgttgacgtagaggcaatactaacagataagattagcaagtctgcgaagaaagatcgtattttagcgcagtatcctaaccaaaaatctactggcatttttgcagaatttttgaaattgattgtcggaaatcaagctgacttcaagaaatatttcaatttggaggataaaacgccgcttcaattcgctaaggatagctacgatgaagatttagaaaatcttcttggacagattggtgatgaatttgcagacttattctcagcagcgaaaaagttatatgatagtgtccttttgtctggcattcttacagtaatcgacctcagtaccaaggcgccactttcagcttctatgattcagcgttatgatgaacatagagaggacttgaaacagttaaaacaattcgtaaaagcttcattgccggaaaaatatcaagaaatatttgctgattcatcaaaagatggctacgctggttatattgaaggtaaaactaatcaagaagctttttataaatacctgtcaaaattgttgaccaagcaagaagatagcgagaattttcttgaaaaaatcaagaatgaagatttcttgagaaaacaaaggacctttgataatggctcaattccacaccaagtccatttgacagagctgaaagctattatccgccgtcaatcagaatactatcccttcttgaaagagaatcaagataggattgaaaaaatccttacctttagaattccttattatatcgggccactagcacgtgagaagagtgattttgcatggatgactcgcaaaacagatgacagtattcgaccttggaattttgaagacttggttgataaagaaaaatctgcggaagcttttatccatcgtatgaccaacaatgatttttatcttcctgaagaaaaagttttaccaaagcatagtcttatttatgaaaaatttacggtctataatgagttgactaaggttagatataaaaatgagcaaggtgagacttatttttttgatagcaatattaaacaagaaatctttgatggagtattcaaggaacatcgtaaggtatccaagaagaagttgctagattttctggctaaagaatatgaggagtttaggatagtagatgttattggtctagataaagaaaataaagctttcaacgcctcattgggaacttaccacgatctcgaaaaaatactagacaaagattttctagataatccagataatgagtctattctggaagatatcgtccaaactctaacattatttgaagacagagaaatgattaagaagcgtcttgaaaactataaagatctttttacagagtcacaactaaaaaaactctatcgtcgtcactatactggctggggacgattgtctgctaagttaatcaatggtattcgagataaagagagtcaaaaaacaatcttggactatcttattgatgatggtagatctaatcgcaactttatgcagttgataaatgatgatggtctatctttcaaatcaattatcagtaaggcacaggctggtagtcattcagataatctaaaagaagttgtaggtgagcttgcaggtagccctgctattaaaaagggaattctacaaagtttgaaaattgttgatgagcttgttaaagtcatgggatacgaacctgaacaaattgtggttgagatggcgcgtgagaatcaaacaacaaatcaaggtcgtcgtaactctcgacaacgctataaacttcttgatgatggcgttaagaatctagctagtgacttgaatggcaatattttgaaagaatatcctacggataatcaagcgttgcaaaatgaaagacttttcctttactacttacaaaacggaagagatatgtatacaggggaagctctagatattgacaatttaagtcaatatgatattgaccacattattcctcaagctttcataaaagatgattctattgataatcgtgttttggtatcatctgctaaaaatcgtggaaagtcagatgatgttcctagccttgaaattgtaaaagattgtaaagttttctggaaaaaattacttgatgctaagttaatgagtcagcgtaagtatgataatttgactaaggcagagcgcggaggcctaacttccgatgataaggcaagatttatccaacgtcagttggttgagacacgacaaattaccaagcatgttgcccgtatcttggatgaacgctttaataatgagcttgatagtaaaggtagaaggatccgcaaagttaaaattgtaaccttgaagtcaaatttggtttcaaatttccgaaaagaatttggattctataaaattcgtgaagttaacaattatcaccatgcacatgatgcctatcttaatgcagtagttgctaaagctattctaaccaaatatcctcagttagagccagaatttgtctacggcgactatccaaaatataatagttacaaaacgcgtaaatccgctacagaaaagctatttttctattcaaatattatgaacttctttaaaactaaggtaactttagcggatggaaccgttgttgtaaaagatgatattgaagttaataatgatacgggtgaaattgtttgggataaaaagaaacactttgcgacagttagaaaagtcttgtcataccctcagaacaatatcgtgaagaagacagagattcagacaggtggtttctctaaggaatcaatcttggcgcatggtaactcagataagttgattccaagaaaaacgaaggatatttatttagatcctaagaaatatggaggttttgatagtccgatagtagcttactctgttttagttgtagctgatatcaaaaagggtaaagcacaaaaactaaaaacagttacggaacttttaggaattaccatcatggagaggtccagatttgagaaaaatccatcagctttccttgaatcaaaaggctatttaaatattagggctgataaactaattattttgcccaagtatagtctgttcgaattagaaaatgggcgtcgtcgattacttgctagtgctggtgaattacaaaaaggtaatgagctagccttaccaacacaatttatgaagttcttataccttgcaagtcgttataatgagtcaaaaggtaaaccagaggagattgagaagaaacaagaatttgtaaatcaacatgtctcttattttgatgacatccttcaattaattaatgatttttcaaaacgagttattctagcagatgctaatttagagaaaatcaataagctttaccaagataataaggaaaatatatcagtagatgaacttgctaataatattatcaatctatttacttttaccagtctaggagctccagcagcttttaaattttttgataaaatagttgatagaaaacgctatacatcaactaaagaagtacttaattctaccctaattcatcaatctattactggactttatgaaacacgtattgatttgggtaagttaggagaagattgatatggcaggttggcgaaccgttgttgtaaatacacattctaagctctcttataaaaataatcatctgatttttaaagattcttatcagacggaaatgattcatctatcagagattgacattctaatcatggaaacaacagatatcgttttgtcgaccatgctgattaaacgtttggttgatgaaaatattttagttatattttgtgacgataaacgcttgccaacagctatgttaatgccgtactatgccagacatgattcgagtttacaattatctaggcagatgtcatggattgaagatgtcaaagcagatgtttggacatcaattattgcacaaaaaattttgaatcagtctttttatctcggtgagtgttctttctttgaaaaatcccagtctattatgaatctctaccatgacttagaaccttttgatccttctaatcgtgaggggcatgctgctaggatttatttcaatacactttttggaaatgatttttcaagagagcaggataatccaataaatgctggtttagactacggatattcattgcttttgagtatgtttgcgcgtgaagttgttaagtgtggttgcatgacacaatttggcttgaagcatgctaatcaatttaatcagttcaacctagcaagcgatattatggaaccatttcgcccaatcgttgataggattatttatgaaaataggcagagtgattttgtcaaaatgaaaagagaactcttttctatgttttcagagacatacagctacaatggtaaagaaatgtatctctcaaatattgtcagcgactataccaaaaaagttattaagtcgctaaatagtgatgggaatggaattccggagtttaggatatgagttatcggtatatgcgaatgattttaatgtttgatatgcctactgaaacagcagaagaacggaaggcgtatcgtaagtttagaaagtttctcttgagcgaaggctttatcatgcatcagttttctgtttatagtaaattattactcaataatacagctaataatgctatgataggtcggcttaaagtgaataatcctaaaaagggtaatatcacactcttaacagttacggaaaaacaatttgcgagaatggtttacctccatggagaacgcaacacaagtgttgccaactctgatagtcgcttggttttcctaggagattcttatgatcaagattaattttccaattttagatgaaccattagtgttaagtaatgctacgattttaacgatagaagatgtttcagtttattcttcattggtgaaacatttttatcaatatgacgtagatgaacatttgaaattatttgatgataagcagaaaagtctgaaggcaacagagttaatgctggttacagatatcttaggatacgatgtcaactcagcacctattctaaagttgatacatggtgacttagaaaatcaattcaacgaaaagccagaagtgaaatcaatggtagaaaaattagcagctactattacagaacttatcgcatttgagtgtctagagaatgagcttgatttagaatacgatgaaattaagattttagaactcattaaggcactgggagtcaaaattgagacacagagcgacactatctttgaaaaatgttttgaaattatacaagtttaccattatttaacgaaaaagaatctcttggtttttgttaatagcggagcttatcttaccaaagatgaagttataaaattatgtgaatacatcaatttaatgcaaaagtcagtactctttctagaacctagaagactctatgatttaccgcaatatgttattgataaggattatttcttgataggcgaaaatatggtataatattagtaaaagcacagtaataacaaggaatcatcgaaactgaagtcctgctgagacgaatggcgcgattacgaaagctcaaaagaaaattttctacgaggttttagagctgtgctgtttcgaatggttccaaaactaattgccaatgcttacaatatcttcgtcagttttagagctgtgctgtttcgaatggttccaaaacatgttctgaattacctttctcgacactccggttttagagctgtgctgtttcgaatggttccaaaacaccatcaaggctcttatctgcagattgttagttttagagctgtgctgtttcgaatggttccaaaacaaatggttgccaatgactttctagagtgatgttttagagctgtgctgtttcgaatggttccaaaacacaaaatcttttgttgctcctggacgtattgttttagagctgtgctgtttcgaatggttccaaaacatgtaaggtattgtaaaacttcttcttgcggttttagagctgtgctgtttcgaatggttccaaaacactgttcctataattaaaataaaagaggtagttttagagctgtgctgtttcgaatggttccaaaactgttccagtaaaaagtaattttaaagcattgttttagagctgtgctgtttcgaatggttccaaaaccgctcgattgatgctatcaactatattgaagttttagagctgtgctgtttcgaatggttccaaaacttcttcaagagaacttgtagaacagcttcagttttagagctgtgctgtttcgaatggttccaaaacaaggtacttttagcttgttcttgtggtgttgttttagagctgtgctgtttcgaatggttccaaaacacagctactgtaaattctgcttttacggttgttttagagctgtgctgtttcgaatggttccaaaactagtgcagttgtcaaggagattgtgagcgagttttagagctgtgctgtttcgaatggttccaaaactttaacctttgaaaatgtgaaaggctcgtagttttagagctgtgctgtttcgaatggttccaaaacgcgatgatggtaagtcatcatggacagcgtgttttagagctgtgctgtttcgaatggttccaaaacttttacacacgatgtcagatataatgtcaagttttagagctgtgctgtttcgaatggttccaaaacagtactgcactaggaattgtagagatcaaagttttagagctgtgctgtttcgaatggttccaaaaccgtaccatctatcaatttaccgcaagctgtgttttagagctgtgctgtttcgaatggttccaaaacttaaaagatttaaactatcaagcgtcaattgttttagagctgtgctgtttcgaatggttccaaaacttctaaatgctggtgactgctttgcataaagttttagagctgtgctgtttcgaatggttccaaaacttgctgctagacccaaacagtttatttttaggttttagagctgtgctgtttcgaatggttccaaaactccttttttagataatgtgcgatcacggacgttttagagctgtgctgtttcgaatggttccaaaacttttaccaatgcttccatatcgcttatatgttttagagctgtgctgtttcgaatggttccaaaactggttatacatttactaatccatcagcattgttttagagctgtgctgtttcgaatggttccaaaacaagctaattctcatctcaccgagatggatagttttagagctgtgctgttattatgctaggacatcattgtggtgttctagttttttgttatactgaaataaattttcagagaatgtgggggaaggcggtaattagattaattcaagacgtaattcagaacttagttggccaagctaacgaaatcaccccaatttatcagtttgattgggaaacttatatattggcgactaaaaaatatgaacgtcatttagaggtgtgtctattagtagaaaattcgaattgtttttcggattcaaagataatgtgtcaataaaagagatatgaaaggctataattccaaccttatggttaaagggctaggttgttctacgctttacttaattattagtttgacagcgttggttcttttagtgattgctggtgttttctttgtcattaatacttgcaagcttacaaggaaagcagtggagaacctatccataatcaactaacagctatgatggatctcacctattaatatagttaaggagtgtccaatactccttttttgaaatacagttggaagttacagaaaacatattttcatgttataatagtggagaaagaaatgaggtgctaatattatggaacaaaccttttttatgataaaacctgatggtgtaaaacgtggttttattggagaagttattagtcgtattgagcgtcgaggcttctctattgatcgcttagaggttagatatgcagatgcagatattttgaaaagacattatgcagaactgacggatagaccattctttccaacattagtagattatatgactagtggtccagtaatcattggagttatttcgggagaagaggtcatttcaacttggcgcaccatgatggggagtactaaccccaaagatgcccttccaggaactattcgaggagattttgcacaagctccctctccaaaccaagcgacatgtaatattgttcatgggtcagactcacctgaatctgcaactcgcgagatagccatttggttcaataactaatagacttaatgaagattgatgttcaagtgttaattctcttttacatcggtcttctttttgatataatattctagagtctataggactgttttaatactttagaagttaaacatatcaaattgtataggaaatagaatgaatattgaagatttgaagaaacgtcaagaaaagattagaaacttttcgattatcgctcatattgaccatggaaaatcaaccttagcagaccgtattttagagaaaacagaaacggtttctagtcgtgaaatgcaggcgcaactgttggactctatggatctagaacgtgagcgtggaattactataaagttaaatgctattgagcttaattatactgctaaagatggtgaaacttacatttttcacttgattgacacgccagggcatgttgacttcacatatgaagtatcacgttcattggcagcttgtgagggtgctatactggttgttgatgcagcccaaggaattgaagctcaaactctggcaaatgtttatttggctctagacaatgatttagagatactaccagttattaataaaattgatttaccagcagcagatccagaacgtgtacgtgcagaagtagaggatgttattggtctagatgcttcagaagctgtgcttgcctcagctaaggcagggattggtattgaagaaattttagagcagatcgttgaaaaagttcctgcaccgactggggaagtagatgctcctcttcaagctctaatttttgattctgtttatgatgcttatcgtggagtaattcttcaagtaaggattgtaaatggtatggttaagccaggagataagattcaaatgatgtctaatggtaaaaccttcgacgttactgaggttggtattttcactcccaaagcagttggacgtgattttttagcaactggagatgtagggtatattgctgcctcaattaaaacggttgctgatacacgtgttggtgataccattacccttgctaataacccagcaatagaacccttgcatggctataagcaaatgaacccaatggtttttgccggtctttatccaattgaatcaaataagtataacgatctgcgtgaagcccttgaaaaattacaattgaatgatgctagtctacagtttgaaccggaaacatcacaagcattagggtttggtttccgttgtggtttcttaggacttttacatatggacgttatccaagagcgcttggaacgagagttcaatattgatcttattatgactgcaccatcagtagtttatcatgttaatacaactgacggtgaaatgcttgaagtttcgaatccatctgaatttcctgatcctactcgtgttgacagcattgaagaaccatatgttaaggcgcaaattatggttcctcaagaatttgtcggtgctgtaatggagttagcacaacgtaaacgtggtgactttgtaacaatggattatattgatgataatcgtgttaatgttatttaccaaattcctttagctgaaattgtgtttgacttctttgataagcttaaatcatcaacacgtggctatgctagttttgattatgaaatttccgaatatcgtcgctcacaattagttaaaatggatattcttttaaatggtgataaagtggatgctttaagctttattgttcacaaagaatttgcctatgaacgtggtaaattgatcgttgataagttgaaaaaaatcattcctcgtcagcagtttgaagttcctatccaagcagctattggacaaaaaattgtggcccgttctgatataaaagcactacgtaaaaatgtcttagcaaaatgttatggtggtgacgtttcacgtaaacgtaagttgcttgaaaaacaaaaagctggtaaaaagcgcatgaaagcaattggttccgtcgaagttcctcaggaagctttcttaagtgttttatcaatggacgatgatgacaaaaaataattcagaaagatgatatcatttatctattttaaagtaacttagcttcgtgcttaagttactttttctttgtctgcaattatcaaataatatggctttataatatatttgtttaaatataaatgagctataaatgagtttttgttagtaactaaataataaaaagatggcaaatagtattgcaaaaagaaaaacatctgatataattaactagttaactaaaacgaaaaaaacatttatggaggactcatgaaaggtcaaaaaattattgctctagctggtcttgtcctgtcatgccattttgctcttacggcatgtcatactcaagaacacaaaaattctcatcatattaaaacaaagcaggttgctaagaaaaaagctaataaaaagaaagtctctgttaaggaaagtcataaaaaacgcaagggtgttgcaggggttgactttccaactgatgatggctttttactgactaaagattcgaagattttatctcatacagattctggaatcgttgtagcacatggaaatcattctcattttattttttactctgatttaaaaggttcaaaatttagctatttaatccctaatgctaatacaaaaactaataaaaatcaagcggtaagaaactttaaagcaggggcggtagctgttaatacattaaatgatggctatgtttttaatcccgcagatattgtttcagaagatgctaatggctacgtggtcagacatggtgatcatttccactatattccaaaagcaagtttatctcagcaaaagcaagtacaagcaagtagagctgtttcacgtttaggaaatcaaagtaatagccattacagggttaatagttctaaaattgcagggcttcactacccaacaagtaatggtttcttatttaatggacgaggaataaaaggcactaccccaacaggtattttagtagaacatcataatcatctgcattttattagttttgctgatttaagaaaaggggggtggggatcaattgctgaccgttaccaaccacaaaagaaagctgattctaaaaaacagtcaccatcaagtaaaaagccaagaactgaaaatactttacctaaggacatcaaagataagctagcttaccttgctcgtgaattacatttagatatttcacgtatcagagtccttaaaacactaaatggtgaaattggatttgaatacccacatgatgatcatacacatgttattatggccaaagatattgatctaagtaagccaattccaaatccacatcatgatgatgaagatcatcacaaaggtcatcaccatgatgagtccgaccataagcatgaagaacacgagcacactaagtcaaataaattatctgatgaagatcaaaagaaattaatttatttagcagagaagcttggtttaaatcctaatcaaattgaagtattaacgtcagaggatggaagtatcatctttaagtatccacatgatgaccactcacacaccatagcaagtaaggatattgaaattgggaagcctatcccagatggacaccacgatcactctcatgcaaaagataaagttggtatggcaactctaaaacaaattggttttgatgatgagattattcaggatattctgcatgcagatgctccaacaccattcccatcaaatgaaactaatcctgaaaaaatgcgtcagtggcttgcaactgttactaagattaacattggacaaagaaccaatccattccagcgttttggtctatcattgatgcctaatattgaagttctaggaattgggtttactccgattaatgatatgacgccagttttgcaattcaaaaaacttaaacagctttggatgacaaatactggtattacagattattctttccttgataagatgccactattagaaggattggatatttcacaaaacggtattaaggatttatctttccttacaaaatataaacaattaagtcttattgctgcagctaataatggcattacttcgctaaaaccattggctgaattaccaaaccttcaattcttagttttgagtcataacaatatctctgacttgacaccgttatcaaacttgacaaaactccaagaattgtaccttgatcataataatgtgaagaatttaagtgcactttctggtaaaaaagatttgaaagttctagatttatcaaacaataaatccgcagacttatcgactctaaaaacaactagtcttgagacgcttcttttaaatgagacgaatacaagcaatctaagtttcttaaagcaaaatcctaaggtatctaatttaacaattaataatgcgaaattagcatcattagatggtattgaagagagcgatgaaattgttaaagtagaagctgaagggaaccaaattaagtcactagtattgaaaaataaacaaggttcgttaaaattcttgaatgtgactaataatcagttaacatcacttgaaggtgttaataattatacttcacttgagaccttaagtgtttctaaaaataaacttgaatctttagatattaaaacacctaacaaaacagttacaaatcttgattttagccataacaatgttccaacatcacaattgaaattgaatgaaaaaaatattcctgaagcagtagctaagaattttccagcagttgtagaaggttcaatggttggaaatggtagtcttgctgaaaaagcagctatggcttctaaagaggacaaacaagtttcagataatactaatcaccaaaaaaacactgaaaaatctgctcaagcgaatgctgatagtaaaaaagaaaaccctaaaacacatgatgaacatcatgaccatgaagaaacagatcatgcacatgtaggtcatcatcaccattaatcttttacagagctaatatataaaatccttcaagaatttcttggaggattttgcatttatatgctaaatcatttatttttttagaaaattagctataatatgactatggttaaaagagaagatgtgattttaaatgcaactgaaaatatggttcaccataaattaaaaaatgatccaagtggccatgactggtttcatattgttagagtaagaaatcttgcggtagaattagcacacaaagaaggggctaatacctttatttgtcaaatggctgcacttttgcatgatattattgatgacaaaatctgccaagatagtaagcaagcgtcgtatgaattgactcaatggttatatagtcaagatcttgccatagcagaagtagaacatatccttgatattcttgaaaatatttcattcaaagcaggaactggattgactatgaaaacattggaaggtcaaattgttcaagatgcagatcgcctagatgctatgggggctattggtattgcaagaacgatggcttattcagggagtaaaggacgtttaattcatgaccctaacttaaaaccacgagaaaacctcactttagaagagtatcgtaatggtcaggatacagctatcattcatttttacgaaaaattattaaagttaaaagaccttatgaatacaaaacaagggaaaatgcttgctcaaaaacgtcatgattttttagaactatatttagccgaattttatgctgaatggaatggtaaacgttaggagtagatatgattcgtagagcgaaagaaaaagatttgcctgatattgcagagctattgaaacaaattttaatgttacatcatgaggttcgcccagatatttttcatacaagaggaagtaagttttctaaagaacaattgaaagaaatgctgatagacgaatcaaagcctatctttgtttatgaatcagacgagggtaaagttgttgcccacttgtttcttcaattacaagaaaaacgtgacttacctcgaaagtcatttaaaactctctatatagatgatttgtgcattgatgaggaagtaagaggtcagcaaattggacaaaagttgatggattttgcaagacaatatgctaagaaacatgggtgttataatataactttaaatgtttggaatgataatcagagagcggtctctttttatgaaaaattaggttttaaacctcaacaaactcaaatggaggagatactataatgaaagaaacacaagaagaattacgtcagcgtattggacatacagcttatcaagtaacccaaaattcagctacggaacatgcttttactgggaagtatgatgatttttttgaagaggggatatatgtagatatcgtcagtggagaggttttattctcttctttagataaatttcaatctggttgtggttggccagcattttcaaaaccaattgagaatcgaatggtgacaaatcatcaagatcactctcatggaatgcatcgtattgaggttaggagtcgtcaagctgactctcatttagggcatgtatttaatgatggaccggttgatgcaggtggtttacgctattgtatcaattcagctgccttagattttattccttatgaccagatggcaaagagaggctatggggactacctatcactttttgattaataagagacgacttaagggtatatcttaagtcgttttttatgtatggtaaaaagaattggtggcaggtgtattcttcatcagtttattttctgaaaaaagagtataatataggtatcaaaaatgaaaacgttttagagaaggagactagaatatggcttctacaaataatgtttcagatacaaacacacgttttgctaaagaggagttagaagaggttttcgaagaattagggacaactcaaggtggtttatcagatgaagaggttgctgtacgtcagaaaaaatatggtttaaacctgttatctgaagtaaagcaagaatcgattattttattgtttctgaaaaattttactagtcttatggcaatactattatgggttggaggatttgtggctattgtttctaatagcttagagctaggtcttgccatttggatggttaatgtgattaatggtatttttagtttcattcaggaataccgtgcaagccaagcaacacaagctctcgagaaaatgttaccatcttattcacgtgttcttagaaaaggctcagaagaaaagatattatcagagcaactagtcccaggcgatattgttcttattgaagaaggagaccgtatttcagcagatggtcgcttgattaaaacaacagatttgcaagtaaaccaatcagccttgacaggggaatcaaatcctatttataaagatagcaatgttgaaaacgaccagtctaaaacattgattgaatgtgataatatggttttcgcaggaacgacggtctccagtggtagcgcaacaatggttgttacggcaattggaatgcaaactcaatttggtcaaatcgctgatttaacacaagggatgaaatcagaaaaaagccctcttcaaagagaacttgatcggttgaccaaacagatttctatcatttcaattacggtaggaattatctttttcttagcagcgactttttttgttaaggagccagtgtcaaaatcatttatctttgccttggggatgatcgttgcatttatcccagaaggtttactacctaccgttacactttctctagctatggcagtccaacgaatggctaaagaacacgcacttgtcaaaaaactttcttcagttgagactcttggagcaacctcagttatctgttctgataagactggtacattaacgcaaaatgaaatgaccgtcaatcatttgtggcaaaatggaaagagttaccaagtgacaggactgggttatgctccagaaggacagattctttttgaaggtgacaatatttgctttggtaatagtgatagaggagacttagaaaaacttattcgttttgctcatctctgtagcaacgctcaagtattaccaccaaatgatgatcgttcaacttatactgtacttggagatccgacagaagcttgtttgaatgttttattggaaaaatcagggataaacatacaagaaaatcgtaagtttgcaccacgtttgaaagaattaccttttgattcggttagaaaacgcatgacaactattcatagcttaggaggcgatgaaaaggataaaaaaatttcaattacaaaaggtgcgccgaaagaaatacttgatttatcagattatgtcttatctgatggcaaagttatccccttaaacaaggaagaacgtaataaaatacagttggctaacgatacatttgctaaagatggacttcgcgtcttagctgtttcatactgcgatattgaaggcttttcaaaagaacaatggacgcaagaaaatttggaacaacacatggtgtttatagggttgatagcaatgagtgatccacctcgtgaaggcgttcgcgaagctattgataaatgtcatgcagcaagcattcgtattattatggtgactggagattacggattaacggcactaagtatcgctaaaaatattggtattattcgtaacgatgatgctaaagtaatttcaggtttagagttatcagaaatgacggatagccaattgaaaaaagaattgtcaggtgaagtcgtttttgctcgtgtagcaccagaacaaaaatatcgagtagtaacgatattacaggagatgggtgaagtagtagcagttacaggagacggggtcaatgatgcgcctgcgctaaaaaaatccgatattggtgtagccatgggtgttaccggtactgatgttgctaaagaatcagctgatatgattctgacagatgatcattttgcttctattgtacatgctgtggaagaaggacgggctgtttatcaaaacattaagaaattcttgacgtatatttttaatagtaatactcctgaggctgttccgtcggcattcttccttttttctaaaggttttattcctttaccattgactgtaatgcaaatacttgctgttgatttgggaaccgatatgcttcccgctttaggtctgggcgtggaaccaccagaaacagacgttatgaatcgtcctccaagacggctaacagatcgcttattggacaaagggctacttataaaatctttcctttggtacggcactattgaatccgtattagctatgggtggttttttctgggctcattacttacgttatggtaattttacttttttcgtcgcaaacggcataccgtacagagaagcgacaactatgacacttggagctattatctttagccagataggtatggttatgaatagcagaacgagctatcaatctattaaagcactatctatttttggtaataaattaattaattttggtataataatggagattttagcatttttagtcttagtatacgtgccactattccataacttattcaacacagcaagcctaggtttatcacattggctctatttaataagctgcccatttatcatgataggtttagatgaagttcggaaattattcagcagtagaaagaataaacggtgatgtcaaatataataacttatttaaaaaataattcaaacttaacttttgatgaattagcattaaacgatgttgacattctttgtttaaatgaatttggctatatttcttttgaaaaacttataaacactacagaaatgaagtcagttttagtctgtgagttatatcatgagtaccttcaaactatggctaaatcatatagctttatgttcacatcacaacgacatgatttatgtcagttaatgatgacctcgaaacgttttaaaaacttaactttatcttattatcgagctgagattagtttagaatttgaaaaacaatttgcagctatggtttttactattcctaacattaattatcatcaggttgtatttcgtggtactgatgccaaccttattggttggaaagaagattttaaattgacttatatgagagaaatatcggctcatcgttcagcgattaaatacttaaatacaatactgccttattttgataaagtagttctctcaggtcattctaaggggggtaatttagccttgtacgctgcaatgtttacaaagccagatttaaaagcaaaaattgatttgatttggcttattgactccccaggactacaaaaaactttgttacctactacagagtataaaactactaaacaaaagtgcattcgcttactaccagaagaatctattgttggtatgatgctttatagtgatatagagccgctaattattagtagcaatgcgcgtggaattctgcaacacgatgttacaacttgggaaattcaagaaccagctattttaaagactggaacaggactatcgctaaaaagtatttgttttgaaaagacatttcaacagtggatggctgaattaaaaagtcaagaaagaaaattattttttgatttattatttgatagcttcctatcaagtggcgtatctagtttggatgacttcaacttggcttccagagcaaaaatgatgaaagcttttcatagctttagagaactagatgatgataaaaaaaggttatttaacaaatctttaaaattattagtaaccatattttggggagcttatcatgataatagcagagagactaagtagctttcctagaattgcattagtctaaacatggtgctaaataaactagcaaaatagcacactaaaaatactactcatattatgctgagtagtatttttagtgtgctatttgatgaagttattctagagtttatgatttttgttttcggaaatactttttagagtattgaagaattccttcttatctgaaaattcgctaatatgttccttaatagcttcatctgaccaattccaccactgagatgcatttaataatgttatttcttcctctgaaaagcgatatttgataattttagcaggtgttccagcgacaacagcatagtcaggaatgtctttggtaataactgaacctgctccaataattgctccattacctattgtaacagatggaagtatagtgacattagttcctatccagacatcgttgccaataataacttttccatttttcttttcatctattaagtccgccctatcctcatttataaatccccttgacttatagtaaataaaagggttagtggtaatgtgatcggttggatgattcagaccagtaatagtaacgttctgggctattgagcaaaatgctccaatttcttttaagttaacgccttcgtaaaagaattgttgatatccatatgtgtactttcctaccgagaatccatatttagggtaactggcaccagtactcatatctgtcctcataggatcatttttaagctctaaacgtttctctaaatgtttttttaaaatactagccataactagcctccaatcgtagactaaatagattataacattttttcctctaaaaaccttaccttttttaataaattctataaattagaatgataaagaacttattctcggatattgacaaagagtgagctaatgaggtggcctaattcaatgttagagtctgttcccagtatttttttcctaagatagaggcaatgtatgaacaaagaaacatacttaaaaccttgtaataacaaggttttaagtatgtatagtaagttatggtaaaatgatatggagccggtgggagtcgaacccacgtccaaacatctgctaatatatttgtctacaactataggttatgtattgatttaactaggtgatgacacataactcaagccctcacatagcgagtctataaatctctttttaactaactagacagtagccaaacgtagtttgctgataaataagaccttctagcaaaacgcaaacaatcttgtgaagatcacgcaggctgttttttaggcagctaatgcgtaagaatttgtattttttgcagttatatttaactggcattttacatctgccgatgagtcgcgaaatatacctcataatgcctgtcgaatccgtaacgaccccaaaagtagaataaagcataaaaacttaccaatatagtataacaaatactatttaaaatagcaaaaatttaacagttgtgttatgattaaagcatgaatatgaaattatcaaaacgttaccgcttttggcagaaggttattaaggctttgggtgtcttagcgttaatagcgactcttgtcttagttgtttatttgtacaaacttggtattttgaatgatagcaatgaattaaaagacctagtacacaagtatgaattttggggtccaatgatttttattgtggctcaaattgtacagattgtttttccagtaattcctggaggtgttacaacagtagcaggtttcttaatttttggtcctaccttaggctttatttataactatattgggattatcatcggaagtgtcatccttttttggttagtcaaattttatggacgaaaattcgttttgctatttatggatcagaagacatttgataaatatgagtctaagctagaaacatccggatatgaaaagttttttatcttttgtatggcatctcccatttcaccagcggacatcatggtgatgattaccggtctatctaatatgtctattaagcgctttgtgacaatcattatgataacgaaacctatttctatcatcggttatagctatttgtggatttatggcggtgatattttgaaaaattttttgaattaaaacaaagtataaatttctaattatctttttatattttcttaaatgctcgtaaagccttattctatgtgctttcgagtatttttactgtaggaagatacttcacgtttctttgcatatttcctcatgtcttagctgtcagaagtggtaaataagtagtaaattcatttgtactactaagcaacaagacgctcctgttgcttctctttattcaagcgtttcatttctgccattgcagaatcgaatgttgcatgtgcgtaatagttcagcgtcatggctatattagcatgtcccataatgtactgtaatgcctttggattcattcctgcatttgcatagttggtacagaatgtatgtcgcaaactatgtggagtgatgtgtggcaatttatcctcgttatacttattgtatttcttaacaagacctttcatcatgccgttgtaatcacttgccacttttggatagttctttctattaagaaagaggaaatcactatatccatcaatctcaacacgcttatcattctttcgattcgctaacactcgcttaaatgcttgataggcttcttcaaccataggaacttgacgttcgccacttttggtctttggtgtttcaatgtagtacccaatttcagtatctctcaatagctgatggtctatattgacaagacgattctcaaaatctaaatctggaagtgtcaaaccaccaaactctgaaatacgaagacctgtttttaagagtatcagaatttcatcataatttttgctgtaggttttatcagcttttgcaaaggctaacagtttttcttcctgttcttctgttagtacggtcttagggacagtatcatcatcaagaactgctttcagttgaaagtcaaatggattcttccgaacacaatcatcttgtatagcaatatagaatgaagcctttaaagaacgtttgtagttattgatggtttgataagcataaccattttcactcattctaatagcccattctttagcgtctgatggcttaatactgtcaatacttcttacacctaacttgtctttcttcaaaatatccataagatatttgcgtccagtttcagtgttttttctaacctttggtctttgagcgttctgttttgcgtaaagctggcagagtgtcattttctttcctacaacatcaataccatcatgaatgtctttctgtaactctgcgattttctctctaagtgagatacaatcacgctttcctgctggtactcggtctgtagccacaagtttccacgagtaaacaaattgcggttctccaaatgaatctatatatttgtataagtatcttccgtcttttcgttggctctctccagtctttaagattcgacctttattgtcacgtcttttttctgacatggcatttgctcctttcctttatggaaagagccttgatacgacttaatactattttatcatatacaagaccctttggcgacgctagattgcgtccaatgtatctataattttttcaaattgttttcgtttaatctgaatacgattgccattcataatcagccaatttgcatttttattttcctctgccaagcgtcgtagcttgttttcgccaatacgaaaatattttgacgcttcttcaatggttagggtataacgttcccaaataggaatgtcagtctgcttcataaaatcctcctttccaaatcacttatttggatttcataaaagttgttttaccagcaatcgaacagctttagcaaagctcacgggagttccacccctgcatggttctcatgtagccatactcattgcctgcgacggttttatcacgctcggactattgactgtatgggagtatcattatcacgataagaatgtcgttgcaggcaatcctgctaaagattgcttctcggatcactaacatgaatcgctcgctatctttataagataggtcatggcggttagttccgttggctcttttcttatcgaaacgtattcgattacttttattcagttttcaaagaacaatggctcgttagcctatcaaaacacattgaaagctcaatatgctttggtggaataacaaacctccctgttcgggaagcgtggaatggtttagcacgcttccacgaaaggagagaggatattacttaatttcaaatgacaaaatctttgtaatcagtctggtttccattcttccacgtaagacttcatcaacgaccatactttgattgccatattcatctttcataagtcgtagggaacgcttcgttatgtaccctctgtaatgatgtagaatctggttaatcgcttcggtatcgccatctgttgcctttacaatgagaggaaagggaatcataggatattgtgttttcattcttcaaattcctccataaactttttaattaaggctagtccactggttctatgccgatagacagtagaacggttcaatttcaacaggtctgcaatttctgaatcgctcatgtccataaagtaaaacagcagtagaatttcacgtttcttgtctggcaactcacgtaatgcttcactcaacaaatcattttcaacgcctactgataacccattgagtgtaaaaatctgaaagtcagttgaatagttatctgttgtcgcaaactggctaacaagataatcgccaacatccgaaaaggacacctcacgctttgcaatccttgaaagataaagcatataattctttcgctcgtcttccatagcacgtttacagatatagtcaaactgattttctattgtggtctgaaaagaagatggtttcatgtttctcaccccctttctgtctaggaaaggaagtgagccttgctcgtttatctcctttcactcttagtcccaatgtgaaagggggatttgttgcattactgataaataaactttgtaaaaaagttctgaatagccaaaaaagcatataaacagatttatttctctgtttacatgcttctgttattctatctatatgatttataaaaccacattggtggacgtacttatctattgcagatagacgactttttttgacaataacccaatgtaaggaaatttattgtatatgatgtacttcatggcgacgttgacctccaacaaaccgccatttggaagtaatatacaatattttaacagcgtaaatagcactaccatataacggttttttttattggcgtttagtagtgctttttattaaatataaacctataaaccatataacacgtttttctatacctgtttttaattcagtaggaacaataaaatgtatagaggtggtctactatgcgtaaaaaagaagataaatatgattttagagcctttggtttagccattaaagaagctcgattgaaacgaggtttaactcgtgaacaagtgggagcattgattgaaattgacccacggtacttaactaatattgaaaataaagggcaacaccccagcatacaagttctttatgaccttgtatcgttacttcatgtttccgttgatgaatttttcttacctgctaataacttggtaaaaagcacccgacgattacagatagagaaatacatggatagctttacagacaaagaactatccttaatggaatctttagccagcggtatcaacgaagcaagaaacatcgaagactaattaaaagaatccatacataacggaaagagccgataaaatgagattgtattaatctcattttatcggctctgcgtctttgcgtctggctctgtaatcacagttactttgaactgctttatttcaattaaattttcttgtctgcatttcggacaatagagggggaatttttttaattcagtatcttcccttatctttaatcgtgttttatttccacatacaggacacaatatccacttgtagtttataataactatctcctcctttacactttaattcaaatctttattaaaaaatatttcatcttatttaacaagaaaccatatttatataacaacataaaatacactaagttattttattgaacatatatcgtactttatctatccgactatttggacgacggggctggcaaacaggttcaccggtagtaacatggtacccttttaactctgttaaacaaacactacgtccatttgtaaagaaagttaaatcactacgatattcttgaatacaccgagcagggatttctccactaagaatgacctcattatttttcaattgagtgtctacgatgttcgcacaatatttaggagcatcgttgtatgctcgtgaaagatattcctgtggcgcataaattttaaaactaagatatggctctaacaattctgttccagctttttttaagacttgttccaatacaataggagcaagcatccgaaaatctgctggggtactaacagggctatagtataagccatacttaaaacagattttacaatccgtcacattccaaccatataatccttgttcgcaaccatagcgtatcccttccataactgcattttgaaatgattgatttaagtatccaagagaaaccgagctctcatactgcattccacttcccaacggaagcggtgatacagataaaccaatggaagcccagaaaggatttggcggcacttcgatgtgaatggtatattctgcattttttaacggtctctccatataaatgactgtaggctcttttagttctatctccacatgatacttttcttgcaacagtgcactaatcacttccatttgtactttccctaagaaagaaagtataatttcatgtgtcgtagaatccacgtaatatcgtagaagcggatcactatctgagatttccaaaagggcatcaagcaacatttctctctgttcaggtttactcggttcaacagttgtttgtagtagagggtgcggattttcaatcttttttctctgtggcaatagttttgtatctccaagaacactatttaacttcaaaaactcattttgcaaaataacaatttctccagaataagctctatcaatcttacataattcaccatttattgaagtatacatttctgtaacttttattttttctttttctgatactctaaccgaatctcgtaaatgtagtactccactataaaggcgtatatatgcaagacgttgtcttttttttgtatattcaattttgaaaacatttccgcaaagttcagacggacctcgatgtgttgatgaataaaatttattcgtaatcacttctataaggttatcaatccctatattgttttttgcacttccgtgataaacagggaacagggaacaattatgaaatcttatgctttcctcttgttcgagttccaatgcttctaatgatttaccggacatatatttctctaaaaggtcatcgtttccctctattaccgtatcccattgttcagattcggtaaagttcgtcacacacatattaggatacagttctaccttctgtttgattacaatttcggcagaaagtttctctttaatatcctgataaaccgttgataaatcaattccattttggtcaatcttattgataaaaaagattgtgggaatccccattttcctaagtgcatgaaataatatacgagtttgtgcttgtacgccatcttttgcagaaatcagtagaattgccccatctaaaactgataatgaacgatatacttctgctaagaaatccatatgtcctggcgtgtctatgatgttcaccttcgtattttcccactgaaaagaggttattcctgtctgaattgtaattcctctctgacgttctaaaagcgtattatccgtcctcgttgtacctttgtccacgcttcctaattctgtaatcgctccactgttatataataagctttctgttaaggtagtttttcctgcatcaacatgagctaaaactccaatattaataattttcatgtgattttcctccattcaaaaacccaaaagggcataaaaatcccagtgataaatacttttatcactgggatttttatgcataaccataggtatacaaagcatacagatattctctggatactttagaatcacatgataaaggtattcttaaactgggtacaaaaaactaagccctcctaaaaaaggacatctaattatttgttcccgctatcaaattgacagtttatttaagaataccttgccgcatatttattaactccttttaaatagtcacttaaataatagcacgtaagagcatatttgtaaaggaatctccaattttttatcaaaaagagtacatgattacaaagtatctgtaatcatgtaccaatatttgttattttacaatcttccaattactcccgttcttttcaagtaccaaatcaaattgagatacctgcgttgctttggtctgctggtcgatatactccactgtcagcgataccgtgacttgattatccttacgattgtgaataggatttaccagttcttgaaagatgtactcttttccgattggttttaatatcccgtcattcacatagtaggaaagttcactggctgtcgctgtaggatagagcttgaagaacgtcgttaaaaactcattgatttcattggttgtaatggaatcaaccgtcccctcactttcaatggcttttggtttataacttgatttcttaggtatgttggtaatggtcggattcttaaccagtaccatatttccagaaccatctacatagacactcactatataagcagagtggacggtctttgtattttctccctctgtaatgagctggtctacactgtaggttacattaaactcattgtcgccagttggctctaccgtccatatctgaaatcctcttacagaagacgatacaggaatatctttgcgtactgtatcaacattgagagcttgaagttcatctgtcagatagccttttagactttccattcgattatcaatggacttatcggattgctcccatgaatagtagactttcgcaaagttctctacaaaattttctacatgatgagtatcaacgtattccttttctatgatagttgtttcgtgaatagtatgagtatctatagctgtaaagtgcttgaatatcgcaaagctgaaactaagccctaaaagtacccacaaggcaatcacaacctttttatgaggattgaccttatagacacgaggtttcttttcctttggtatctgtttttctttattctgattttttctaaatttcatcattaaatcttcctttctcattgtttgattcgtcctgctcccactaaatgctgttgccagtaggggcttgttaagtcggcataaccgattgggtcgcctgcatgaaacatacggttattgccaaggtatatcccaacatgagtaatataagagccagcgttataggtagaatgaaagaaaaccaaatcgccagcttgtgcttccgatagtgggatatgctgggtcacatcatattgctgttgtgcggttcgtggtaagttaattccagcttttccatacgtccattgtgtcagtccgctacaatcaaaagaagtagtcggggaagctccaccgtaaacgtatcgccagccctcatatttcagtgcttcgtccatgatggcttgtaccgtatcatcatcaaactctgttgtgacaagatactgcgttaccagttgcacataaaacatattgccatagttgtatcgccagcccccattgataggtatggctatgggattggggtaagacactttttcgccacctgaatactcttttgagaaactttgagccagttcaaaggtatatttatttccacgattagccacataccctaagaaaccaccaccataattgtaggactggataaccgattctaaatctacactgagcctttcgctactggctaataattcactgaaatacttcacaccttgcttaatggattcttctgtactcaatgaattaggtggaagaccgagggattccgaggactgcataacatcttccgcagtaccgcccgattccacctgtataatcgcaagaagtatgttgacatattcttcaacgccatattctttggcatatttttctaccataggcttatgagccagcacttctgcggaaacattcacacctccataatgaatattggaaattccgctgtcctgttcatctgaaaataaaatggcaacaaacagaagcagtgagaagaccatcaagaataatccagaaccaccaatcactaaagttttcaacttcatggtttcttaccgactttcttaatggtggcggttttgattggtggtctacttcttgtattttgtagtggtactctttgaacagtagacggacgttcttttgtgattggacgttgtgaagttctatctgctgtagtggttgaagttgctggcttttgaacggttttttcttgaacggtattgccttggcgttccacttttggacttgaaaaatcggacttaactgctggacgctcttgtttggcttgttgagattccttatatgaagtctgaatattagactgttttgaggtctgttcatcatgatattgttcttgtcttgtagtcggtctttcatgaacagaagaagcaggctgttttttctgtttgacctgttccatttcagagcgacgcttcgcaatggtttttcgcctttgttcctgctgttccttgcgtccactggctctgtccgctttggtttgagaaatactactggttaaatcacggacattctcttttactttggattttccttgatatactgcatatcttgcattggtcggcaaatctttaacctgttctttcaaaccactagcagtgtctaccattctgtctttggtatcagctactgtaccgatggtttgaccgatacgttttccaagtgttgatttttcctttccgtctggtcgggagtgatctgcttgtgtccttgcagaactccccgaacccgactgtccttttttacctgtaacaatggcagacccagcccctagagtagtcatggaacgtccaagtttccgctgtagacggtgcatgtgagcgtgcataagcatacgaggttttctcatcacacgacttcccacactttgagaatcgttactctgtagagaaaacatactcattaaatcgcccagcttgaagtagattcctgcaaaggtcacaatctgtagaaaagcaatcaaaaagaacggataaccagccgataaggtatagagcatggttgaaatactaaatgctgtcgtaataatcaatgtgattccagctcgtgtcaaaatggtattaaagagctttgttatggctcgttttgacataccatcaaatgatggaatcatgcttaaaataaagctcacaggcagaaacatagcatagatgataaaaagtacctgcgagaaaatcatgattcctgttaataggaatacaaatatggaaatcccaatattgaagacaaataggaagaagactgtacctaaacggttaatggtctttgtaatggttagattggtattgcttctgtcttcaatttcttccgcaacaattttttctctgtcttcgccattgttggaatctgggctggtggagagcaggctttccacacggtcaataccgatactttcaatgtctgaactgttgtattgaagcagtagccacggttgctgaacctgtatggaaaacaggctatctctgattaagtccacgctgtccttgccttgactatcggaatggggcatgacaatcttcgtgccaagtgataaactggcattactgatgtctgatgaaaagtcattgatttttttaatgtagtcgggagcgtaggcaataaaggaagccgataggataaacaccagcacaaaattcataatggcatgaattgcctttgtggtttctctctttatcagtcccgtataggcaacataaaccccaagaaccaaaatcaagagtaagaggaatccaacatagaaaccctctgttgaaaatccgtttgcactcacaccagctaaggtctgcatattcttaccaatggaatctgctgtagcggaaatgaagtctaaggaataggcttcctgtactaagtaacctgtcgcattggaaacatacaaactgattgtccaaataaaattggtaatggcatatagtccatacatgacctgttttccaatcccgtccgaccagttccacggaagccagccccagctattatccacataaaaatccagttgatagttttcaagtgggtatcggctgtattcatttgccacattgaccgtatcatctaccaagcccgcagcttgaaccaccgttcccagcatggctaaaagaaaaatggcaatcacaagtgtgaaagccactgtcattgccactttacctagacgtttcagcgtccagtttgattttattctgtttactattgatggtttcacatttacacctcttttcgcacaggtggtctggtatcaaaggcatggagcagttcttcaaatacagggtggaactgtatcacaccgacacgaccatataaatcactgataaggcattgcccgttttccaaatcacgcaatcgcttctgattgttttcgtcctctgggtctacaccaaaaaaggctaaggtctttttaatctcgttaaggtcagtggaacgaaatgcaaattttaagccgaggttatttttcagtttttcatctaagaggtcgtctgtattttgggtcacgaaatataccccagcgttcatagcacgaccagcccgaaccagcttcatagatagtgtttttccttgtgctacctgtaaaaagctccatgcttcgtctaaatctacaatcttgaaaatgcttcggtctgtatggataaagtctaaagcaaaggtactaatgacaatcagcatagcaacggataaaagctccatagtggtatattcctcaaaggaagtttccttgtcgggaagtaccaagtccgcaacctgtataatgttcagttgtttttctaagctgatagactgctccacataaccattactgaataataaatgtgcaaagtcatagtctgtaaaactttcgatatggtcggctatactggtacttagtggcgtattctcaacccgtaattcctcaatcactttcatcaaccctcgtacttcactattggttactgcacgaatggcttttctaaggattgggaagcgttccccatcacgagaggaaatccccgtaaggaatgtcagaatatcaatagccagtgattcagaatctttgggatttttcataatcacataagggtcaagtaagcctttgtttttctcatcagaagtcagagtgacgatattgatttcatgggaaatctctggcaaggtttctttccatctgccacgttctgcttttgggtctacaatcactgcttgtgccccataaagcaccgcataatagacgataaggttattcgcaaaggatttaccaccacccagcgaaccaacaaaagccgacgctaacgcattggttactgaacccttaaccccttgactggcaagagcaggtttcagatagacattgcgtccagtatctaagctgtagccaacataaatcccctcattttcccccagcatttgagtagcaccaaaacctaaaccagcgaggaaatcagaggtcacgtattgaatataatcattcatataacgcttgctggcaggtaaaaattcttcatgtaagccgagcatatccccaaatggtcgtaccagttttacgcttaaatcgtcataaaaatctttcacttcattacaacgacgtttgagttcgtcaagatcatttgctgatacccttaccacataagacagcttgtacatagattccttgctttggtctaaattggtttccagctcattcacactttccagagcttccgccacattggagctggtttcattatcactttgccaagcgtggttatccaagtctttcagttctttctttttttgcggacagtagatagggctttacgattcgctacaatttccacattcattgacgtatcaatcgggaatgtaaattgctgttgctggtagtagaagatttcagaggacgggaagtccagttctccgacaatgctgttaatggtaaagtaagctacatagacggtttcatcttcctgctggattttcaaatatcgctgtttttcttccaccaaacagcgagtaggcttaatcaagtcatagtatttaatcagcgtttcattatccagctttttctttgatagatggtactcatactcttcataggcagtgcctgtctgtccgtaaaggtgttcaatcagatagccgaagtcgtccttatctaacctgcggattttgaaacgacgagagattttattttctaagagcttttccatcttctgaaaacgcaggatttcatcattactcatactaacaaaatcgcccatcagcttatggttcacatcatagacaaaatcagacaaagcattttttgcttcaacggtaagacttttcatagaaaactcctgatcgttgagaagcaacttaaagccgataaagaaacggtagttcacttgattttcgccaatcatggatattaaagcgtctgtctgttggtcgattttgtcataggcaaccgctttgagcttgccagtgacttcatttttggaacgctcttgtgcagaacgtatgctggattctgtactgatttgtaaagcatgaattttgccatcacgattttgtgcgataagctgtctgaaagaatcatgcacttgtattttctgttctggacttagaaatgagtaattgtaaggaacaagctcatagtaagcataacattccccgtctttattccagacgagattgttttcaatgtatttaattggatatgccataaaattcactcctaactgctgtaatggcttcttgtggctggtttctgccaagcgttactttttttcctgcataggtcagctttggtcgcagtgcataagcaatgacagacttcaaaaatccataaggctttttaccatcaaaagtttttgtagacataaaccatgtgaaagccacaggaatcccaaagtatttgagaaatgctccctctatcatggaaagagggggcaagttgccaagtatcatcactgcaaagagtgacacgacaaaccatgtcatttgcgtaaaggttatgggaaacggaagtctaaaatcattgatagaatacagtaccttttccacagaccagatactggtatagcttcgtattttcttcatgtaatcaatcctttcataaaaaataggggtagctgattgagccaccccgtaaaatagaaaatctgccagtagtaatgtaccgacagatttaatagacgatttcaaaaatcccatgattggttgagataaacgttcctgaaaggtctaaatcccgaccataggcttgataatcaatatagttttgaagactagctggtacttcgcctaaagcacccgtttcttcaatgtagtagcgtgccacgtcatacatatcatcacaatcggaatgaatgataatatcctcttgatgttcgcttagttcttcaatgcttgaaaaatgagtgagcagagcagatagctccgattgtaattcttcgggtaattccgataccatttcccatagtcgattgagttcgccaatggaagtgtattcgtcaaccgtaaagggtaactcgtagtcatgaatggcgtattcctcatattcatcattcaagccgattttctctttgacttcctcaaagtcaatgggaaaggtaaaccacgcaccgaccaattcgccctcattgtatttgcctaaattcgcaatatagacttgcatatcgtccatatattcacgtcctttctttgtagagattcaaaaatccctaccgcacttcgtttggtgtaccattcctttgcggaacataagaaaaccacttatattccacaaaagaacggttttatttaagcaccaataatgcgattgaatagctctagtaaaatgtcttttactccagcagcgttgaagactaagccaaccgcaataatcgcaataattaaaaagccaatcagtttgctaaactcacgcttgaagccaagatacaagccaatcacaacgattgctaaaagcaccagtgattgagcgtttgatagaaaccagttataaaggttttgtccaaaattcataaaaatgttctcctctctatattcaatgaatttgtatttgagttatttttttgttgttatcacgtcctgttcttttactgactgttgcttcaaaatctgcttgtgtcggtctgtcagtttcgcatggtcgagaatgtcttttacaacctgcgtctggttgatttcatcaagtttaatcgcaacctttaaggtcggggcaacttgatgagatagccagttcagcgtcctttggaaggagtaaggctctggttttgtggttagttttaatcgttcacgattgttcccaataaaccaagcccattcttcattcagtttccaatcagaacgaggtttggaatcgtctttatctacaaaacggatataccgattgataattttaaaggcggtatgctctggattgtcatagacgagtaaatcacggactgcataataggcacgctcatttttcaatcgaatctcaaaacggttttttacttctgcgtcttcaatgggaatatcatttttcttgtactgctcgtagtccttttcatagatacagaaataaacttcactttgtaatgaaccgatatagagggtgtttcccatacattccttttcctctttgcgtaccagttcgccactgcgatagcttttaaaactgcggaagacggagatacattcttcctgttggcacttttcagtgagtacagggatatttaaaatccctgtcttatcgttaatggcaaggtcaaggcgtttcatcacaccgccagccaccaaaacgtccataaagaactcataccagcttctttgttgtgccagaagatagctttcaaattgtctgcacccacgacctttcaattccaccagaactcctttgtccagttcatgggagcaaaggacgaatatgtcgcctaaagcataatgctctgaataagaatagaaaccatagtcctcatgaagaaaataggacagtttcagttgtaagatgttttcgaccacctgctgtacgtctgttgtcggaaagcgaattcttacataatcaaacagcatttcaaggggagcgtcgggattgaagcgttccagagcttcccaaagggactgctgtaaatcctctgatggcttgacttttcctgtttcaatatcgcttagatactgccttgtaataccagtcgcaacagctaaacggttttgagatagtccataagccaagcgtttttcttttaaatgctgtaaccaagtttgttcattcagtaaaaatccctccaatcaaaaaggcgtatgtcaacttttaaagcccatttgacatacgctgaaattttgtaaatcccttgtaaccaaaggattttctaatgtttttttgactgtttcctgtcgatttgtacccccctgttagatacggggggttaagtgctggcgtggctattgccacaccagccagcaagatcagtccacacctgcgacttccgcttcgcacgtcgcctgcgtggactgtctgctgttggataactttttaatttcctccaagaaatcatatccttttggtacaaggggagtataaaactctgatatgacacttgttcctacatcaacatagccacgacctttgattcgctttaagaagaaatccttttgtacgtcactgccaaacatcatgccatagcccatttcagacatacgacctaaagccactctgaaattaaactgatcacggattccgtcgcctaaatattttgcgtctggacgttgacaagccagtattagaaagaagccagcttgacgacctaacatgacaatctgtttcagcttattcataactgcggtgttttcttttgttcccagcatttccatgaaagcgacgtattcatcaaagattaagaagtgtgccgggagacctaagtaagcataatttttgccagtcttatagttcttcatctgcttcatttcctcactacgtttcatcatttcttcatagaatgtttcaatgcaagaaagcaagtcttcttttctatagtagacatttgccatcacagaacctaagtccgcaagatcagcatttttcgggtcaagaatatacagttttgaatctgtatgaagcaaggcttcaatcagtgtcagtataaagtaagttttaccgccacctgtaccaccagcaatcaacatatgagggagcttatcatattcccaccatacgtttttcattaagcgaagtttaccatctttagcttctacttcatcaatagaaatacgactggctatggtgtcatagagcaaagtatattccacataggaatcctttaactctttatccgtcagctcacagtacaagccactctctaatttcttttccaagtgtaagagttggtcttgatattttcccagcgtgatttccacccgtatctgtatcaagccatttttaagtcgataatacattttagggaagtaggttatcttttcctttgtacgaccagcactatctttaaagaaaccctctgttttgacctgttcagattcataccacttgttttcaagtatcatctttgccagtttttgacggtggtaaagttgtttaaccgtatcatagcgaacccgtttgaatacaaacgctaccagcaagcagataagaattgcgacactgaaactgataattaaatagggaatgtcaatcttatctgcttgtgataggttaaaatcctgccagttgatctgctggattgtcttcacatgaaacagtccgacaaccagcaggaaaacaggcaggagtgacgctatcgtaaaatgaaagactaaatctttaccagatgggcgaatccttttaccacgctgtttcatgcgaaaaagtctcctttctacctagcgactatttgtcttgtgtcggttctttctttgcttgtggttgagctttgaatgaactagaatcctttgtcagcacaatatcgtctgccttgatataccagtcaacatctgctccttgataggtggcagtagcaacggtgtccgcaatgggattgataagttccacccgtgcgttataatcaaactctttcaaaggcacgctggcaggaatacttacttgaatcatgcgtccttgtcctttggattttaagtcataggtacgttccttgatttcatctgaaaccgacccgtcttcattttggattctcacttcacgacgtagagcagagaatttcaattctccaaaagtcgtgtctttatctaatacaatgccatttgctaatctcatcatttttcctctctttctttattcttttatcatgtcgtcagcatgtaaaaggtaatttgtaaaaccacgagtgccgattttgtagccctctgcggtaatacgtggattgactaacttcacacgttcctcaaagccgaaatgtttttcgccagcttcagcaggaagcaccaccacaatatcatctgctctttgaacatcagaatagagattatagcttcttgataagacagttagccgtccgttgattcttcgctgaacgactttatcctcgccagcaaattctaaattgccgaatgttttttccatgttgggaatcacaaatttaagttccatatttttacctatcctttcttttttattggctgaatgaatgtttgatggtcttaaagagtggggaacgaccttttgattcttgattttttgttttcataagttcacttcctttcaaaatcgggtaaaaaaatagacacctcattttttgaagtgtctacctattaaatattcaaattttattggaagtatctttatatcttcacttttcaaggataaatcgtcgtatcaaagctcattcataagtagtaaattagtagtaaattgagtggttttgaccttgataaagtgtgataagtccagtttttatgcggataactagatttttatgctatttttatttataaaaataaaaaaaggttggagatatatctccaatctttttattgtatattaagtttgtacttaataatagagtgtgtcaacatatagaatatagcaatttcaacaatgctaacaagtatattgtagagcaatacaggttgagagaatgttgcatttgcatgagagttgaataaatcaatatgaaaaatactatctattattaatgttaagaaagtaattaagagtgatattccaaaataagaaacaattcccatcaatacacgtttgtttgtaaataattgccctacagcgatagagagataaatcagtaatgtccctgcaacgtacgatagaaagaaataggcgataaaaagtggagcgttcgaagatgaaataattttatagatttctggaaaagcgacaacgaactgaccaatacctactaaaggtaatatgaccaatatgattccaataatgacaataaaaatattaaaaatactccaaagaagagaagctagtagctttgaacaaataatctgattcgtagttactgggagcgttaaggttagatatccttgacggccgaagatattgctataaaaacgtttgataataatagcaagggtggataacagagatcctgaaataaccatcgctaacaataaaacgagtattatagtgaatatttgggcgctagtactattagtatcagtagaaaaattgccgccaagtgcctttaataccagtcctaaaataatagatactaataaaaccgcagcgttgagtgttagataccacttaccaactgattttaattcatattttaataattttccaaacatatcaatctcctttatttcttgaatctttcacgaaagagagcatcaatcgaacagttgtgctcttctcttaagtcatcagcattgccttgtaggtcaatttctccttctttaaggaagataacttcatcaaggataggttcaatgtcagaaattaagtgagtcgaaattaaaacagaagcatcattagagtagttgctaatgattgtttttaaaatgtagtcacgcgctgcagggtctacaccaccaataggttcatcaaggatgtagagcctagctttacgactcataacaagtattaattgaactttttccttgttcccttttgataggttttttagacgttccctaggatttaggttaagatcctcaaatagttgatatgctacctttgaatcaaaatcgttatagaaatcttcaaataatgtaacgacgtctttgattttcatattttcttgtaaatatgaagtatcagggagatatgaaataatttttttggtttcaacagacggtctgtaaccatcaataacgatatctcccttatctggctgaagtaatccatttatcattttgatgattgttgtttttccgctaccatttggacctaataaacctataatctttcctgttggaatacttacagtcacatcattaacagcagtatgtttgtgatatttctttgtaacatgatgaagttgtaataactgtgtcatttaattaatctcctttataaaatgatcgagagcaaccgtaatttcatctaatttatatcctatttttttcatgttgttgacaaaagttgctaactctgcttttgcaacttgttgacgaattttaccaattagtaagttgtcttctgtaacaaagcgtccggaagtacgttgtgagaataccattccttcacgttccaattcagtgaaggcacgttgcatggtatttgggttaacaccagcttcttgagctaactctctcacggtaggcaattggtcaccactttttatttcttgactaacaatttgcatctttatatgttcagcaatttgtgaataaataggtgatttttcattgaattcccaagccatagataactcctttcataatcttgtactttttgtactataaaaatagtacaaaaaaatatttgaaatgtcaaggaattatcattgagactttaatcgtttattgtttcatagtataatagtaaaaaatcgtaaaaaggggctactatgtttgcacaacttgatacaagaaccgtttattcttttatggatagcttggttgatttaaagacatatgtctctaaatcgaaatcattaggatatcaaactattggtatcttggaccacagtaatctttatgcagcatatcattttattcaagaggcgcaaaaggcaaacctaagaccaatagttggatttagctttgatatagtggttgaaaatagatcaatagaagtttactgtattgcgataaatacagttggttataagaatctcttgaagttgtcaacggctcaaatgtctgagaagatgtctctaaatttattgacagaacatcttgaaggggtgcaattgattcttccctatcaagatgttcttgatcagctcaatttaccctttgattatgttattggtgttaatttgacctctccgcagattccatataccaaacccattatagccatagatactgttcgatattttcaaaaaaatgatattgagacattacagatgcttcatgctataagagataatgtcctgttaaaagacgcacaatatgcgagcaaaaatcaagaattaaaaccttgtcaagaaatgactctagcattcaaggaacgttttcctgaagctttagctaacctagaatctttggtagagaatgttgcttatcactttgattctgactttaagttacctatttttaatagagaaattcctgctggagaagaattaagaaccttaactcaaaataacttaaaaagtaaaggtttatggagcgatgcttatcaagagcgtctcgaaaaagaattaacaatcattcacaaaatgggctttgatgactatttccttattgtgtgggatttattaagatttggtcgtagtaagggctactatatgggaatgggacgtggttcagcagcgggaagtttagtctcatatgctttaaatattaccggtatcgatcctgtcaaacataatttaatttttgaacgttttttaaatgaagagcgttattcgatgccagatattgatattgatcttccggatatttatcgtggagaattcttgcgctatgtacgtaatcgatatggttcaatgcattctgcacagattgtaaccttctcaacttttggtgcgaaacaggctattcgagatgtttttaaacgctttggtgcatcagagtatgagttaacaaacataactaaaaaaattcatttcagagataatttgaccagtgtttataaccgcaacttagctttcagacaaataatagatagtaaaattgaataccaaaaagcctatgatattgctaagcgtattgaaggaaatcctagacagacttctattcatgccgctggggtagtaatgagtgacgatttgttaacagatcatattcctttaaaaaacggtgaggatatgatgataacgcaatatgatgctagttctgttgaggataatggtcttctaaaaatggactttctaggtcttcgaaatttgacatttgttcagaaaatgaaggagaaagtcgataaggactacggtatctctatacaattagaaactattgatttagaagataaagagactctaaaactatttgcagctggtcaaacaaaggggatttttcaatttgagcaaagtggagctattaatttgttgcgacgtattaggccagagtgttttgaagatgtggtagctaccaccagcttgaataggcctggtgcaagtgattatactgagaattttataaaccgtcgttttggtaaagaaaaaatcgatttagtagatcctgtcatagctccaattttacaacctacctatggcataatgctctatcaagaacaggttatgcagattgcccagacctacgcaggttttacgctaggcaagtctgatttgctcagacgtgctatgtctaagaaaaattctaaggagatgcaaaagatgtctcaatccttcttagagggtgcagtatctaagggacatcgtcaagaagatgctcgacttatatttgaacgcatggctaaatttgcaggttatgggtttaatcgcagccatgcgtttgcttattcggctttagcttttcaattagcctatttcaaagcccattattccgatgtcttttatgacatcatgataaattattcaaatagtgattatctaatcgatgctattgattttggttttgttattgaaaaaccttcaattaatactatttcatacagagaccgcatctataaaaagaaaatttatttaggtttaaaaaatattaagggtgttcctaacgatttggcttattggatttctaaaaatcaaccgtttcagagtattgaagattttctaatgaggctgccacagcagtttcaaaaaagtggttttatttctccgctaattgctattggagcatttgacgaatttgataataatagacggaaaatcacctctaatcttgattctttatttacatttgtaaatgaactaggtagtttatttgcagatacctcatatcattggctagaagtagaagatttctctaattctgagaaatatgaaatggaacaagatatcttaggagtaggaatcagcccgcaccctttagtggggatttcacaaaaagctagccgtccgtttataccaattagtcaagttcaagaaaatagcgaagctactattttagttcagctaaagcaggtcaaagttattaggacaaaaagttctgggcaacaaatggctttcttgactgttatggatattaattcaaaaatggatattactgtttttcctgaaactttcaatattgtaagagatgatttacaagaagggaaatattattacttgcatggaaaaattcagaagcgagatgagcgattacagatggttttaaacggtgttcaagaagcaacggaggaacgtttttggatacttctaaaaaatcatgataacgacaaaaaaatatcggaaatattgtccaaatacaaagggcatattcctgtctatttgcattatgaaacaactaaagaaactatccaaagcaaagtacatttggttagaaaagatagtggcttagcccttgatttatctgaatttgttgtgaaaacggtttatcaataaaattgcatataaagtgcagaaatttacaaattaatatgctataattaaatcgttaaattaataaaaggagtaccaattaaatgaaacgtattgctgttttaactagtggtggtgacgcccctggtatgaacgctgctatccgtgcagttgttcgtaaagcaatttctgaaggtatggaagtttacggcatcaaccaaggttactatggtatggtgacaggggatattttccctttggatgctaattctgttggggatactatcaaccgtggaggaacgtttttacgttcagcacgttatcctgaatttgctgaacttgaaggtcagcttaaagggattgaacagcttaaaaaacacggtattgaaggtgtagtagttatcggtggtgatggttcttatcatggtgctatgcgtctaactgagcacggtttcccagctgttggtttgccgggtacaattgataacgatatcgttggcactgactatactattggttttgacacagcagttgcgacagcagttgagaatcttgaccgtcttcgtgatacatcagcaagtcataaccgtacttttgttgttgaggttatgggaagaaatgcaggagatatcgctctttggtcaggtatcgctgcaggtgcagatcaaattattgttcctgaagaagagttcaatattgatgaagttgtctcaaatgttagagctggctatgcagctggtaaacatcaccaaatcatcgtccttgcagaaggtgttatgagtggtgatgagtttgcaaaaacaatgaaagcagcaggagacgatagcgatcttcgtgtgacgaatttaggacatctgctccgtggtggtagtccgacggctcgtgatcgtgtcttagcatctcgtatgggagcgtacgctgttcaattgttgaaagaaggtcgtggtggtttagccgttggtgtccacaacgaagaaatggttgaaagtccaattttaggtttagcagaagaaggtgctttgttcagcttgactgatgaaggaaaaatcgttgttaataatccgcataaagcggaccttcgcttggcagcacttaatcgtgaccttgccaaccaaagtagtaaataagaatttgtcaatttgacactttaaataaaaaggagctcataaattattatgaataaacgcgtaaaaatcgttgcaacacttggtcctgcggttgaattccgtggtggtaagaagtttggtgagtctggatactggggtgaaagccttgacgtagaagcttcagcagaaaaaattgctcaattgattaaagaaggtgctaacgttttccgtttcaacttctcacatggagatcatgctgagcaaggagctcgtatggctactgttcgtaaagcagaagagattgcaggacaaaaagttggcttcctccttgatactaaaggacctgaaattcgtacagaactttttgaagatggtgcagatttccattcatatacaacaggtacaaaattacgtgttgctactaagcaaggtatcaaatcaactccagaagtgattgcattgaatgttgctggtggacttgacatctttgatgacgttgaagttggtaagcaaatccttgttgatgatggtaaactaggtcttactgtgtttgcaaaagataaagacactcgtgaatttgaagtagttgttgagaatgatggccttattggtaaacaaaaaggtgtaaacatcccttatactaaaattcctttcccagcacttgcagaacgcgataatgctgatatccgttttggacttgagcaaggacttaactttattgctatctcatttgtacgtactgctaaagatgttaatgaagttcgtgctatttgtgaagaaactggcaatggacacgttaagttgtttgctaaaattgaaaatcaacaaggtatcgataatattgatgagattatcgaagcagcagatggtattatgattgctcgtggtgatatgggtatcgaagttccatttgaaatggttccagtttaccaaaaaatgatcattactaaagttaatgcagctggtaaagcagttattacagcaacaaatatgcttgaaacaatgactgataaaccacgtgcgactcgttcagaagtatctgatgtcttcaatgctgttattgatggtactgatgctacaatgctttcaggtgagtcagctaatggtaaatacccagttgagtcagttcgtacaatggctactattgataaaaatgctcaaacattactcaatgagtatggtcgcttagactcatctgcattcccacgtaataacaaaactgatgttattgcatctgcggttaaagatgcaacacactcaatggatatcaaacttgttgtaacaattactgaaacaggtaatacagctcgtgccatttctaaattccgtccagatgcagacattttggctgttacatttgatgaaaaagtacaacgttcattgatgattaactggggtgttatccctgtccttgcagacaaaccagcatctacagatgatatgtttgaggttgcagaacgtgtagcacttgaagcaggatttgttgaatcaggcgataatatcgttatcgttgcaggtgttcctgtaggtacaggtggaactaacacaatgcgtgttcgtactgttaaataatttttgaattcaaacctattatttaagaataccttaaataatgggttttttatatgttttgctttttattattcgattattgtgactagaataggatatgatattaataattaccctcctttttttatctatgaaaacatgatataatggaaaaaagattaggagtagttatggttaaacgcgattttattagaaatattattttagcattgattgctgtattgattttgattctcttgagatattttgtttttgcaacctttaaagtacataaggatgctacaaattcttattttagcaacggagatgttgttgttgttaatcgtaataggacgcctaagtacaaagactttattgtctataaggttggaaagattttctatattagtcgtgttattggtgagccaaatcaaaaagtgagagtaatggatgatattttatatttgaatgatgttttcaaggatgagccttacattgaaaaaatgaaaaatgcttattctgaaaagaaagacggtcaaatgccctttacttccgacttctcagttgaaacattaacacgaaataaagaaagcagagttcctaagggttcttatcttgtgttaaatgataatcgacaaaataaaaatgatagtcgaaaatttggattaatcaaagagaaagatattcgtggtgttattacctttaaagtataccctctaagtgaatttggttttacagcttcagagtagtaaaagaatggtattatttgataccattctttttatgtaataaaatggctaagaaatatatttttttaagatagatagaatttttgatagcgtttatctcgttatcacagaaaatcaaaaagactataccaatttttttattgacaaacaaaaacattaattatatactgtttttgttactttttaacggtatatattaatatataccaattcaaaaagaaagtttagatagaaagtataagagaaagctcttattggtaataataatatgtgtggtatcgtaggtgtagttggaaatacaaatgcaacggatattttaattcaaggcttagaaaagctagagtaccgaggatatgactcagcaggtatttttgtagtaggtgataacaaaagtcaacttgtgaagtcagtcggtcgaatcgcggagattcaggcaaaagtaggagattctgttagtggtacgacaggtatcggtcatacacgttgggcaacccatggtaaacctactgaaggaaatgcacatcctcacacttcaggatctggtcgttttgtattggtacacaatggtgttattgaaaattaccttcaaattaaagaaacttacttaacaaaacataacctcaagggtgaaactgatacagaaatagctattcatttagttgaacactttgttgaagaagataacttatcagtgcttgaagcctttaaaaaagccttacatattatagaaggatcatacgcatttgctcttattgattctcaagatgctgatacgatttacgtagctaaaaataaatcacctcttctaataggtttgggaaatggttataatatggtgtgttcagatgccatggctatgatacgtgagacaagtgaatatatggaaatccacgataaagaactcgttattgttaaaaaagatagcgttgaagttcaagattatgatggtaatgtcattgaacgtggtagctacacagcagagcttgacttatcagatattggtaaggggacttatccattctacatgcttaaagaaattgatgagcaaccaactgtgatgcgtaagttgatttcaacttatgcgaacgaatctggagatatgaatgtggattctgatattataaaatcagtccaagaagcagatcgtctttacatattggctgcaggaacgtcatatcatgctggttttgctgctaagaccatgatcgaaaaattaactgatacacctgttgaacttggagtttcttcagaatggggttacaacatgccacttttgagtaagaagccaatgtttattttacttagtcaatcgggagaaacagcagatagtagacaagttttagttaaagcaaacgaaatgggaatccctagtttaactataacaaatgtgcctggctcaacactttctcgtgaagcaacctatacgatgctcattcatgcaggacctgaaatcgctgttgcttctacaaaagcatatactgctcaagttgcaacgttagctttcttagcaaaagcggtaggagaagcaaatggtaaggcagaagcaaaagattttgatttggttcatgaattgtcaattgtagcacaatcaattgaagcgaccttatcagaaaaagatgttatctctgagaaggtagagcagttgttaatctcgacacgtaatgccttctacattggtcgtggtaacgactattatgttacaatggaggctgcactgaagctaaaagagatttcttatattcagacagaaggttttgctgcaggtgaattaaaacatggtacaatttcgttgattgaagacaatactcctgttattgctttaatatctgctgattcaactattgcagcgcatactcgtggaaatatccaagaagttgtttctcgcggagcaaatgctttgattattgtagaagaagggttggaacgtgaaggtgatgatattattgttaataaagttcacccattcttatcagccatttcaatggttattccgactcaattaattgcttactatgcttcattacaacgtggcttagatgttgataaaccacgtaatttggcaaaagctgtaactgttgaatagactcgttacactaaaatacgctaatattaactacaaaatattaaaaattgtaaaaaagcctatttttgaaggaaaataggccacgccaaacgcatgaagaaacttttgttttcagaaaactagattcataatgacaaaatcaatcaaagtagtacactatagatgaggtgactacgatgattgattttattatttctattgatgattgcgcagttgaattggatagtcgtcaatcttggaaaattcgctaccccttatcaaccattctatttcttgtctttgtttgtcagttagctggcattgaaacctggaaggagatggaagattttattgaaatgaatgaaccattgtttgcgacctacgttgatttgagtgaaggttgtccgtctcatgataccttagagcgtgtgattagtcttgttaattcagaccgtttaaaagagcttaaagttcaatttgagcaatcattgacaagcttagatgccgttcatcaactgatttcagtggacggtaaaacgattcgaggcaatcgaggtaaaaatcagaagcctgttcatattgtaacggcttatgatgggggtcatcatcttagtttgggacaggtagcggttgaggagaaaagtaatgaaattgttgccattcctcagttattgcggacaattgatatccgtaaaagcattgtaacgatagacgcaatgggcacgcagacggctatcgttgatacgattataaaaggtaaagcagactattgcttagccgtcaaaggaaatcaagaaacactttatgatgatattgctctttattttagtgatgtcaacttattggaagaactccaagaaaatgcgcagtattatcagactgttgaaaaatctaggggacagattgaagttagagaatactgggtgtcttccgatatcaaatggttgtgtcaaaatcatcccaaatggcataagttacgtggtattgggatgactcgtaacacgattgataaggatggtcagctgagtcaagagaatcgttattttatctttagctttaagccggatgtcctcacatttgccaattgtgtacgaggtcattggcagatagagagtatgcactggttattggacgttgtttatcatgaagatcatcatcagacattggataaaagagccgcatttaacctaaatcttatccgaaaaatgtgcttatattttctcaaagtgatggtatttcctaaaaaagacctcagttatcgtcgcaaacaacggtatatttctgtccatttggaagattatttagtccaattatttggagaaagaggctaagcagatcattgatttaaaaaggaatcttttcaaaattgatgtccgggcacaaaaggatgaagagaaagttttcatgcgtacggcgtggaaaataggctttttcctattgtcaagaagcctataatcagttagaatgttacttgctgactattttattaattaatttaaggagagaaaaatgtcattaccaaattgccctaagtgtaactctgaatatgtctatgaagacggtattttactggtttgtccagaatgtgcttacgagtggaatccagaagaaatcgaagaagaagtaggtttaattgtattggatagcaatggaacgcgcttatcagatggagatactgtgacagttattaaggatttaaaagtaaaaggagcgcctaaggatattaagcaaggcactcgtgttaaaaatattcgtttagttgatggcgatcataatatcgattgtaaaattgatggttttggagctatgaaactaaaatctgagtttgtaaaaaaatagctttcaggcaattggcaacggtcaattgctttttgaatatgacttgatttcatgcatttttattaaaaaagctctatgacattggtttgaattttgatataatgagaacatctattttttatttaggggggaccatgtcttatattttagaaatcttacctagcttattagtaggtgcgcaagtgacattgcaagttttctttattgttatttgtttatcaattccacttggtattgttgtagccttcctaatgaaagttcattttaagccgcttcaatggctactgacaacttatatttggattatgcgaggcacgcctctgttattacagcttatctttttttattactttttaccaagtgtagggatttcttttgatcgtatgccagctgcgattattgcttttacgatgaattatgcagcttattttgcagagatttttcgaggaggtattgagtctattcctaaagggcaatatgaagctgcaaaggtattaaagttttctaagtttcaaacggtttggtacatagtattacctcaagtcttcaaaatagtcttaccgagtgttttcaatgaaacgattactttagtgaaagattcctcattggtttacatacttggtgtgggcgacttacttctagaaagtaagacagccgcaaatagggatgcaacacttgcaccaatgtttatagcaggtggtatttacctattattaattggtcttttaactattttatctaaacaagttgaaaagcgttttaactactataaataaggagggacgatgttagaattaaaaaatatttctaaatgctatgggcaaaaagaaatctttaaagatttcaatctgactgtagaagaaggtaaaattctctctttagtaggaccttctggaggtggaaaaacaacactattacgtatgttagctggattggaaaagattgattcagggactattgttcacgatggtaaagaagtatctgttgatcatttggaaacactaaatcttttaggattcgtcttccaagactttcaattattcccacatttaacagtattagataatttgatcctctctcctgttaaaacgatgggattatcaaaagaacttgctaaagaaaaagccttagtattacttgaacgcttgggacttaaagaccatgctttagtctatccattttcattatctggggggcaaaagcaacgtgtcgcactagctcgtgcgatgatgattgatccacagattattggttatgatgagccaactagcgctcttgatccagagttgcgtcaagaagtagaaaaactaattttacaaaatagagaaacaggtatgacacaaattgtagtaacacatgatcttcaatttgctgaaagtatatctgatacgattctcaaaattaatcctaagtagacttgggggtagattgttgactcacaaaaatatattattaaccattatatttggattatttatgattatattatcagcatgtggtatgtctaataaggaaatggctggtattgataattgggaacattatcaaaaggaaaagaaaattactattggatttgataatacttttgttcctatgggatttgaaagtcgttctggtgactataccggctttgatattgatttagctaatgctgtttttaaagaatacggtatttcagtgaaatggcagcctattaactgggatatgaaagaaactgaacttaataatggtaatatagaccttatttggaatggttattcaaaaacggcagaacgtgctaaaaaagtcgcttttacaaacccatatatgaataatcatcaagtaattgttactaaaacttcatcacatattaatagtattaaggatatgaaggggaaaaaactaggagcccagtcgggttcatctggttttgatgcttttaacgctaaacctgatattttaaaaaagtttgtaaaaggaaaagaagcagttcaatacgatactttcactcaggctttgattgatttaaaaaataaccgtattgatggtcttttgattgatgaagtttatgctaactattatttaaagcaagaaggaaatataaaagcttattattttgttaaaactgcttatcaaggagaaaattttgtagtaggagctcgtaaagttgatcgtagactaattgaaaagattaacaaagctttcaaacagcttcataataaggggagatttcaaaaaatctcttacaaatggtttggtgaagatgtttatagtaaagaataaaagactaggaatttctcctagtcttttattctacgaaaaaattaaataaaaaacatcgatatatccgatgttttctaggttaattaaccaagtttagttgcaagacgtgctttatcgcggcttgctttgtttgtgtgaattaaacctttagaagcagctttgtcgatgcttgaagaagcagcgcggtaaagttcttctgaagggttagcttcaaatgctttaatagcagtacgcatagctgatttttgtgctgagtttttttcgttttgtttaacgttaagttcagcgcgtttgatagctgatttaatatttgccaatgttttcacctccatattaatctaactatataagtatatctaattaagtgatttttggcaaccctttatcactttttgagataaatttcatcaattttatgatgtttccctttatgaataataaaatcagccctatttctggttggttctatatatttttcaaggttgactaaattaatagttttccaaatatctttagctagttccatagctttatgtggcggtatttgtgtgaatttatgatagtaattactagggtctgcttcggctaattgtagaagactgttaaatcgttgtaaataccattcttcaatttgtttattttcagcatcaatgtatattgaaaaatcaaaataatcattcatgtaaagtcgatggttttgttggttttgaaagacatttattccttctaaaattaaaaaatctggtgtttcaatagtttgcaattgatttggaacgatatcgtagatttcatgagaataaattgggattttcgcggttataccgttctttatagtatctaagaaatttagaagtgactccatatcataggattccgggaaacctttacggtttaaaattccattttgtatgagtttctcgttaggatataaaaagccatcagtagtgactaattcgacgtgactatctttaaaagttcgtgaaattagtaattgtagtaagcgactggtagttgattttccaacagcaactgaccctgatatgccgataataaaaggacgttgataattttcctttttaagaaatattgctttagaaaaagataaattttcttgactacgtttatagatttgaataaggttaattaaaggaaggtagatgtcaataacatcttgaatattaatattatcgtttaagcttttgatagattcaagctctttttcagttagtaaagcttgggattgctgatgtaagtccttccaattttctctggaaatacggtcgaaattaataaattcattattcatgtcaaactcctatatgaaagctattataacattttattgagtgattgaaaaccgtttcaaaatatggtaaaataatatggcgaaattggagggttagaattatttatggctaatatgtattatacagagaatcctaatgttgaacatgatattcatgagctaaatgtcaaattattaggagaatcattcagttttttaactgatgcaggagttttctctaaaagaatgatagattatggtagtcaagtccttctaaatagtttacattttgaaaaaaataaatccttgttagaccttgggtgtggatacggtccgctgggaatttctctagccaaagtgcaaggagttaaagcaactatggttgacattaatacgagagcattggaattagctaagaaaaatgcaacacgcaatggagtagtagttgaagtctttcagtcaaacatttatgaaaatatttctaaaactttcgactatattataagcaacccacctattcgtgctggaaagcaagttgttcattctattatcgaagaaagtatctgttaccttaatacaggcggtagccttaccattgtcattcaaaagaaacaaggcgctccaagtgcaaaagctaaaatgctagatacttttggtaattgcgatattttaaaaaaagataagggatattatatattgagaagtgaaaaagtctaaatgatatccctaaagcgtaaaaataataaatagttcggataataactatcgtattattttttggaaaggttttctctaaaaatgttttctttaaattccgtataagataaaaagaattctgctttttattctgaaaattataaaaaactacttacattatctaaaaaaaatggtaaaatagattcagctaaaataccaagactaatgaaactacaagacttggttactcaataataaatacttctgtgtttgataagaagataataaacgtgttctaaaaattttgccagtaaacattatgaagcgaaaggtgcagctactaaaaatgggaaatatagagttgaaaaaattggctgtaaaagcgagtgaaaatgcatacgttccttactcgaaatttccagtaggcgcagcattgcgtacagcagaaggaaaaatatttacaggatgtaacgttgaaaatatcagttatggattagcaaactgtgctgagcgtactgcaatttttaaagctgtttcagaaggttataaagatttttcggaaattgctatttatggaaatactgaagaaccaatttctccttgcggtgcatgccgtcaagtgatggtggaattttttaataagaatgctaaagttacattgattgctaaaaatggtaagacggtcgagacgacggtcggtgagttgttaccatactcgtttgttgatttaaaataatttaaatcagttgctcttttaagcatttagcttaaatattaagttttttaggagggttcatttcatgaacaaaaaaattgccgggatcggcttggcttcgattgcagtacttagtttagctgcatgtggacatcgtggtgcttctaaatctggtggtaaatcagatagcttgaaggttgcaatggtaacagataccggtggtgttgatgataaatcatttaaccaatctggttgggaaggtatgcaagcttggggcaagaagaatggccttaaaaaaggagctggttttgactatttccaatcggcaagtgaatctgattatgcaactaacttagatacagctgtgtctagtggttataaattgattttcggtattggattttctcttcatgatgctattgataaagcagcagacaataacaaagatgttaattacgtcatcgttgatgatgttattaaagggaaagataatgttgcaagtgttgtctttgcggataatgaatcagcttacttagcaggtattgcagccgctaaaactaccaaaacaaaaacagttggctttgtaggtggtatggaatctgaggttattacccgttttgaaaaaggttttgaagcaggtgtcaaatcagttgataaatcaattaaaattaaagttgactatgctggttcattcggtgatgctgctaagggtaagacaattgcagccgcacaatatgcttctggcgcagatattgtttatcaagtagctggtggaactggtgcaggtgtattcagtgaagcaaaatcacgcaatgaatctttaaaagaagctgacaaagtttgggtattaggtgtagaccgtgaccaagcagcagaaggtaagtatacttctaaagatggtaaggcttctaactttgttttggcttcatcaattaaagaagttggaaaatcagttgaattgattgctactaaaacaagtaaaggtaaattcccaggtggtaatgtaacaacttatggtttgaaggatggtggagttgatatagcaactacaaacctttcagatgacgccgttaaagcgattaaagaggctaaagctaaaattatttcaggagatatcaaagttcctagcaaataatatctttaagaactttcaaaaaagcgattagaaatcgcttttttgaagctgagataaacttatatctcagtaaaatccatcagtcgttaacgattggtggattttactgaactataaatgaatttttctgaaagggagaaccacatgacacagaatgtcattgaaatgaaagaaatcactaagaaattcggtgattttgtggcaaatgatcatatcaatttgacggttgaaaaaggtgagatacatgctctgcttggcgaaaacggtgcagggaaatcaactttaatgaacatgttagcaggtttactagaaccaacagacggtcaaatttttattaatggtcagcctgtaactattgattcaccttccaaatcgtcacaattggggattggtatggtacatcagcatttcatgcttgttgaagcatttactgtagctgaaaatattgttctaggaaatgaaaccacccaaaatggtgttttagacattaagacagcagctaaagaaataaaggaactatcagagaaatatggtttgtcagtaaatccaaatgctaaaatatctgatatttctgtaggagcacagcagcgtgttgaaattttgaagacactttatcgcggtgcagatattttaatttttgatgagccgacggcggtgcttacaccatcagaaataaaagaattgatgacaattatgaagagccttgttaaagaaggcaaatccattatactaattacccataaattggatgaaattcgggcagttgctgataaagttactgtgattcgccgtggtaaaagtattgaaacagtccctgttgcaggcgcaagttctcaacaactggcggaaatgatggttggacgatctgtttccttcagaactgaaaaaaaggaagctaatccgactgacataatcctttctgtaaaggatttagttgtagaagaaaatagaggcggcgttctagctgttaaaaatctgtcgttagatgttcgagcaggtgaaattgtaggtatagctggtattgatggtaatggacaaagtgaattaattcaagctattacaggtttaagaaaggtaacttctggtcaaattgtaattaaaggtaaagatgtcacaaaattttcaagtcgacaaattacagaattaagtgtaggtcatgttccagaagatcgtcatagagatggtttggttctagatatgacgatggcagaaaatttagctttacaaacttattataaagagccattgagtcataaaggtatccttaattttgctaaaattaaagagtatgctcgtcaattaatgacagaatttgatgtgcgtggtgctggtgaacatgttttagcaagaggattttctggtggtaaccaacaaaaagcaattattgctcgtgaagtggatcgcgatccagacctactcattgttagccaaccgactcgtggtctagatgttggtgctatcgagtatattcataaacgtttgattgaagagcgcgataaagggaaagcggtcttagtagttagctttgagttagatgaaatcttaaacttatcagatcgtattgcagttattcatgatggtaaaattcaaggaattgttaaacccgaccaaaccaacaagcaagaattgggtattttgatggctggtggaaaaattgaaaaggaggagagagatgtctaagaaggcgcaaaaaattgcagttcctctgatttcagttgtactaggaatcattctaggagctattattatgctgatatttggttatgatccactttggggttatgagggattgttccaaacagcattcggtagtataaaaaatattggtgaaattttccgtgcaatgggaccattaattttaattgctctaggtttctcagttgccagtcgtgcaggtttctttaatattggacttccagggcaagccttatcaggatggattgccgcaggttggttcgctctttcacacccagatatgccacgtccagcaatgattctttgtactattattattggtatcgttgctgggggaatcactggagctattccaggtattctcagagcataccttggaacaagtgaagttattgtaactattatgatgaactatattgttctttattcaggaaatgctattgtacaacgtgttttcccaaaaagcattatgcgtacaagtgactcgagtgtatatgtttctgccaatgcatcataccagacagattggttatctagtttaacgaataattcacgtatcaatattggtatcttcattgctattattgcagttgtgttagtttggttcctattaaataaaacaacgcttggatttgaaattcgttcagttggtttaaatccaaatgctagtgagtacgctggtatgtctgcaaagcgtacaattattctatcaatgattatttctggagcttttgcaggacttggtggtgttgttgaaggactaggtacatttgagaatgtatttgtacagccatcctcgttagctattggctttgacggtatggcagtaagtctactcgcagcgaatagtccaataggtattttatttgcagcatttctatttggtgttctaagtgttggtgcgcctggtatgaacattgcaggtattccacctgagttaattaaagttgtaacagcttcaatcatcttcttcgtaggtgtccattacattattgagtatgttattaaacctaaaaaacaaatgaaaggtggtaagtaaattgagtttaacaacgatttttgcattgctattttcatcaatgctaatttacgcaacacctcttatctttacaagtattgggggaaccttctctgaacgtggtggtatcgtcaacgttggtttagaaggaattatggtaattggagctttctcaggcgttgtatttaatttagagtttgcttctgtttttggtgatgcgactccatggatttctgtactagttggtggtttagttggtttaattttttctgttatccatgcagttgcgacagttaattttcgtgcagatcatattatcagcggaaccgttcttaatttaatggcaccttcattagctgttttcttgattaaggttctttataataaaggtcaaactgataatattcaagaatcatttggaaaatttaatttccctatactatcagatattccttttgttggtgatatcttctttaaaggaacaagcttagtcggttatattgctattcttttctcattccttgcttggtttattctatataaaactcgctttggattaagattacgctcagttggagaacatcctcaagcagcagacaccttaggtattaatgtttatcttatgcgttactctggtgtcttgatttcaggtttccttggtggaataggaggagctgtatatgctcaatctatttctgttaactttgcagcgacaactatattaggaccgggctttatctccttagcggcgatgatttttggtaagtggaatccaattggtgcaatgcttgctagtctattctttggtttatcgcaaagtttagcagttatcggtagccatttaccacttttgagcaatattccaacagtttatctacaaattgctccatatgtcctcactatcattgtattagcagctttctttggacaagcagtagctcctaaggcggatggtattaattatattaaaacgaaataaataaaaagaaactagtataagctagtttctttttattgtttgtgaatttgtgaaaaaatactttgtgaaaatttcacataaattataatacaataacaataaaatataaaaaaatagaaaattgagtcattattctagtaagagtttgtgaataatgttataatgtgttttgttattaattatttataaaggagaactcttaatatgagtaaaatcgttgtcgtagggacaaaccacgctggtacagcagcaattaaaacaatgcttagtaattatggtgaagccaatgaaattgtaacatttgatcaaaattccaatatctctttcttaggatgtggtatggctctttggattggtgaacagattgatggtccagaaggattgttctactctgataaagagcagttggaaagtatgggagctaaggtttacatgaactctccagtacttaatattgactacgataaaaaagaagttacagctttagtagatggaaaagaacatgttgaaagttatgaaaaacttattttagcaactggttcacaacctatcattccaccaattaaaggtgttgaaattcaagaaggatctcgtgaatttaaagctactcttgaaaaccttcaatttgtgaaactttatcaaaattcagaagaagttattgaaaagttagctaaacctggtatcaatcgtgttgctgttgttggggctgggtatattggtgtagaattagcagaagctttccaacgtattggaaaagaagtaacacttgttgatgttgctgatacttgtatgggtggttactatgatcgtgactttactgatatgatgagtaaaaaccttgaagaccatggtattcgtcttgctttcggacaagctgttcaagcagttgaaggtgatggtaaagtagaacgtcttgttactgataaagaaacatttgatgttgatatggtgatcttagctgttggattccgtccaaatacagaactcggtgcaggtaaattagatacattccgtaatggcgcttgggtagttgataagaagcaagaaacaagcgtgaaagatgtttatgctataggtgattgtgcgacaatttgggataattctcgtgatgatatcaattatattgctcttgcttcaaacgccgttcgtactggtattgtagcagctcacaatgcatgtggtacagagcttgaaggtgctggtgtccaagggtcaaatggtatctcaatctatggccttaacatggtgtcaactggtttgactttagaaaaagcaaaacaagctgggtacaatgcagttgaaacaggctttaatgaccttcaaaaaccagaatttatcaaacacaataatcatgaagtagctattaagattgtctatgataaagatagccgagttatccttggttgccaaatggtctcacacgaagatgtatctatgggaattcatatgttctcacttgctattcaagaaaaagttactattgaaaagcttgctttgaccgatatcttcttcttaccacattttaataagccatataactatattacaatggctgcattaggcgctaaagattaatttaaaattaaaaaggttaagcgaaatgcttagccttttatttcatcctttaacaaggtcaaaaatgtaacggcaaagaaaaagctaagatattcctatcctagctttttttcaactatgttagttttttgatgcttcttggaattctgggtttttccaagcttcgtcaataatatcttttaattgttcagctgaggcttgcattttttgaagttcagcatcatttaatgggatattaactggacgaacgataccatgtgcacctacgattgcaggctgaccgataaagacatctttaacatcaccgtattggccttcttgatatacagataatggaagaactgcattttcatcatcaaggatagctttagtaatacgagcaagtgcgacagcaataccgtaatatgtagcaccttttttgttgatgattgagtatgcagcgtcacgaactgaaataaacaaatcaacaagtccttgttcatcaatatcgcgattttcttgtaaccattgttcaagttggacaccagcaacgttagcatgtgaccaaacggcaaattctgagtcaccgtgttcacccatgatgtatgcgtgaactgaacgagcatcaacaccaattttatctgctaaagcttgacggaaacgtgcagagtcaagtgaagtacctgaaccaataacgcgttccttagggaaacctgagaatttccaagttgaatatgtaagtacatctacagggttagccgctactaagaagataccgttgaaacctgattcaacaacttgagttacgattgatttgttaattgctaagtttttaccaacaaggtcaagtcgagtttcacctggtttttgaggtgcgccagcagtaatgacaacaaggtcagcatctgcgcagtctgcataagtagctgcgtagatttttttaggtgatgtaaatgcaagggcatgtgaaagatcttcagcatcaccaacagctttatcaaataaagctgggatttcaatgatacctaactcttgcgcaataccttggttaacaagtgcaaaagcgtaagaagaacctacggcaccatcaccaacgagaataacttttttatgttgtttagttgcagtcatttctaaacatctccttaaatatttttgggaagtttcccatacacctatattctatcattttcaatgaaagaagtcactaataaaatgtgaaaaaatttgcaaacaaattgaaatatcatagaaaactattgaaaacgctgagtgtcttgatatttttgataccgatttatcatcgcaattttacctaaattatggtacaatgtaagagacttacagtgaagaaaaggggcattttttaatgcaagataaaaatttagtagatgttaatctaactagtgaaatgaaaacgagttttatcgattacgccatgagtgtcattgttgctcgtgcacttccagatgttagagatggtttaaaacctgttcatcgtcgtattttatatggtatgaatgaactaggtgtgacacctgataaacctcataagaaatcagcacgtattactggtgatgttatgggtaaataccatccacatggtgattcatctatttacgaagcaatggtgcgtatggcacaatggtggtcatatcgtcatatgctcgttgatggtcatggaaactttggttcaatggatggggatggtgctgccgcacagcgttatacagaagcacgtatgagtaaaattgctcttgagatgcttcgtgatatcaataaaaatacagttgattttcaagataactatgatggcagtgaacgtgaacctcttgttttaccagcgcgtttccctaatttattagtcaatggtgcaactggtattgctgtaggtatggcaacaaatattccaccacataatctaggtgagtctatagatgctgtcaaattggttatggataaccctgatgttactacacgggagttaatggaagttattcctggtccagattttcctactggtgccttggtgatgggacgttcaggtattcaccgtgcctatgaaactgggaagggatcaattgtcttacgttcacggactgaaattgaaacaacttcaaatgggaaagagcgtattgttgtcacagagtttccatatggcgttaataaaacaaaagtacacgagcatattgtacgtttagcacaagaaaagcgcattgaaggtattactgctgttcgtgatgaatcaagtcgtgaaggcgttcgttttgttattgaagttcgtcgtgctgcttcagcaaatgtgattttaaataatcttttcaaattaactagcttgcagacaaattttagcttcaatatgcttgctattgaaaaaggtgttccaaaaattttgtcattacgacaaatcattgataactatattgaacaccaaaaggaagttattgttcgtcgtactcagtttgacaaagctaaagcaggagcccgtgctcatatcttagaaggtttacttgtggcgcttgatcacttggatgaagttatcacaattattcgtaatagtgagacagacaccattgctcaagcagagttgatgtcacgttttgaattatcggagcgtcagagtcaagctattttagatatgcgtcttcgtcgtttaactggattagaacgcgataaaatccaatcagaatacaatgacttactagctttaattgctgatttagcagatatcttagctaagcctgaacgtgttgttaccattataaaagaagagatggatgaggttaagcgtaagtatgctgatgcccgtcgtacagaattaatgattggtgaagttttatcacttgaagatgaagaccttattgaggaagaagatgttcttattactctctcaaacaagggatatatcaagcgtctcgctcaagatgagtttagagcacaaaaacgtggaggacgcggtattcaagggactggagttaataacgatgattttgttcgtgaattggtttcaacaagtactcacgatactgtgcttttctttacaaatttagggcgtgtgtatcgtttgaaagcatatgaaattccagaatatggacgtacagctaaaggcctccctatcgttaaccttttaaaacttgacgaaggtgagacaattcaaacaattattaacgctagaaaagaagatgtcgctaataaatatttctttttcacaactcagcaaggtatagtgaaacgtacaagtgtttctgaatttagtaacattcgtcaaaatggacttcgtgctattaatttgaaagagaatgacgagttgattaacgtcctcttgattgacgaaaatgaagatgttattatcgggacacgtacaggctactctgttcgcttcaaagtgaacgctgtacgtaatatgggacgcacagcgactggggtacgaggcgttaatcttcgtgaaggtgataaagttgtgggagcttctcgtatcgttaatggacaagaagtactaatcatcactgaaaaaggttatggcaagagaacagaagcttcggaatatcctacaaaaggccgtggtggtaaaggaataaaaaccgctaatattactgctaaaaatgggccattagcacgcttagtgacgattaatggaaatgaggacatcatggtcattacagatacaggtgttattattcgaaccaatgttgctaatatttctcaaactggtcgttctaccatgggtgttaaagtgatgagacttgatcaagaagctaaaatcgtcactgttgcgctagtggaacaagaaattgaagataagtctaatatagaggatacaaaagaataggaagttatgcgtaataaaaaaaaatcacatggtttctttaactttgttagatggttattggttgtattgctaattattgttgggttggctttggtgttcaataaaccaattcgcaatgctttcatagctcatcaatcaaatcattatcaaatttcacgagttagtaaaaaaacaattgaaaaaaataagaaatctaaaacaagttatgacttttcatcagtcaaatctattagtacagaatcgattttatctgctcaaacgaaatcacataatttgcctgtaataggagggattgctataccagatgtcgaaatcaatctcccaattttcaaaggactgggcaatacagagttgagttatggtgcaggaacgatgaaagaaaaccagattatgggaggcccaaataactatgccttagctagtcaccatgtctttggtttgacaggttcttctaagatgctcttttcacctttagaacatgctaagaaaggtatgaaagtttacctcactgataaaagcaaagtatacacttacactattactgaaatttcaaaggtaacaccagaacatgttgaggttattgatgatacacctggcaagagccaactcactttagtgacctgtacggatccagaagccacagaacgtattattgtgcatgctgaattagaaaaaacaggtgaattttcaacagcagatgagtcgatattaaaagcattttcgaaaaaatataatcaaattaatctctagaaggtagttagaattatgaaattaaaggctgttcatcatattgcgataattgtttctgactatgaaaagtcaaaagacttctatgttaataagctaggatttgaaattattcgtgaaaaccatcgtccggagcgtcatgattataaattagatttacggtgcggtgatattgagcttgaaatatttggaaatcgtcttgatgatccagaatatgaaactcctcctcagagaataggtaggccgaattggccacgtgaagcatgtggtttacgacaccttgccttttacgttccagatgtggaagcgtacaaggtagaactggagaatttaggaatttttgtagagcctattcgttacgatgactatactggcaaaaagatgacctttttctttgatccagatggtttacctttagaattacatgaataataaacaaagttgcgtggatacgcaactttgtttaatttactgaataattttatattcaagaagttttttaaagaaataagtaagttaatcatggtataatgtaaggtatgaaaagaattgaaaaggaattattttgaaatgaggatactaaaatgagtattaaaaagctattgtttgcaggccttgcttttattttatttaccctagcgagtccagcatatgctgcatcagatgttcagaaagttattgatgaaacttatgttcaacctgattatgtcttaggttattcgctaaatcaagaacagcgtgcacagacattacaacttctgaattatgatgaatctagagacacgaaagttaaaacgctaaatactagctcatatgctaaaataatgaatatagctgatgatgcaagcatccaattatattcatctgttaaaataaaaaaattagggtctaacgataccttagcagtaaacattgttacacctgagaatattactaaagttacagaagatatgtatcgcaatgctgcagttacattaggtattgagcatgcaacgatatcagtggctgctccaataaaagtaactggggagagtgctcttgcaggtatctattattcattagagaaaaatggagcaagtgtatcatcagaaaataaacaactagcacaagaagagttaagtactttatctggtattaatgctgagaataagggtaaggaaggttatgacgccgacaagcttaatgtagctttaacggatattaagtcagccgtagctaaaggaggatctgatctttcaaaagatgatattcgaaaaattgttgaggaaacattgaaaaattatcatcttgataacgctgtaacggaaaatcaaataaatttaattgttaattttgcagttaatctttcacaaagtaatgtcatcaaaaatagtgatttcacgaacaccttgaataatttgaaagacaacattgtttcgaaagcaggatctaaatttaaaaatatcaatgtcaattttaatgctaataaagctgttgaatcaggtaagggatttttagctaatatttggcaacaaattgttaattttttccagcagtttggtagttaataaaaaagtctagcttataagctagactttttttaccctaaataaatgtttgtgtttttttactaatctttaaatgaatatttaagaataaatggcgcaataatagttgatagtataacaacaataacaagctcggaataagtagtgcttgaaataattttagcagctaatccaacttgaactataatgagagccatctcgccacgactgaccattccaccaccaattgttaaagattctaattttgaaaaattaaagcctcgaccgacaaagtaccctggaattaattttgataaaacagccaaagcagtaaagattaatatcgtgtgaaggtgagacatcattccatcgaatttaagaggtagtgcaattgaagcgaagaaaattgggataaagaaggtgtaactaagaagtgaaattttatgttctaccttatcaacaaaagaagtttgtccaatagctaatcctgcaaaaaacgaaccaatgatagaactcattccaactttatcggctaaaattgatagagaaaaacagataaggatagcaagaatagtatatttctcaaagaaatgaaccttttcgattaatttgaaaagagcaggtacaaggtatttcatacaaataaataagaaaacaaagaataacaattgaatgataatttgtaatccgatattagaagagcttccatttgttgcaataaagacactcagaagcaaaacagctaagacatcatcagcaacagcagcacctaaaataatagcaccagtatctgtttttacacgattgtattcttgtaaaacttcaactgtgatagaaatactagttgcagcaaatacgagcccgtaaaagatagcagtattgatttggaacccaaacaagcgtgtcaagaagtagaagagagccataggaacaataacaccagtaattgcgaccagtagactgggcttaagatacttctttaaaagatcaaaattagcttcaagacccgctaaaaacatgagtaagataacaccaatttctgacaagacatgtaatacctgattttgatgaacaagtcctagcattgcaggtccgatgatgatacctacaagtagttgtccaacaacagccggtattccaattctttttgaaataagagttgcaagaacgcttgccaacaaaatgattgtaatttgaatgataatatgcattttttcctcctaatattaataaaatgatatcaatcatattgtactgaatatttagaataccattttttaagcctaaaatctaggaatatttcttttctgtctttttcatattattatcaagaaaatggaaaaatatactgaaaaatattcaatttaagaataatgaacttgtaactatcgaactacataaaaatgatattttaagtgtaagtatctcttattagacttcctgcgaaacaaaatatggtacaatagttctatgaattatgaagcaagcaaacaattaactgatgtacgatttaagcgccttgttggtgttcagcgcactacttttgaagagatgttagctgtgttaaaaacagcttatcaacgtaaacacgcaaaaggtggccgaacccctaagttaagcttagaagatctcctcatggctactcttcaatacatgcgagaataccgcacttatgaacaaattgcggctgattttggcattcacgaaagcaacttaatccgtcgaagtcaatgggttgaatcaactcttattcaaagtggttttacgatttcaaaaactcatcttagtgctgaggatacggtgattgtggatgcaacagaggtaaaaatcaatcgtcctaaaaaaatcaactagcgaattattctggtaaaaagaaatgtcatgctatgaaggctcaggcgattgtcacaagccaagggagaattgtttctttggatattgcagtgaactattgccacgatatgaagttgttcaaaatgagtcgcagaaacatcggacaagctgctaaaatcttggcagacagtggttatcaagggatcatgaagatgtattcacaagcgcaaactccgaggaaatcaagcaaacttaagccactaactcttgaagataaaacctataaccatacgctatccaaagagagaatcaaggttgagaatatttttgccaaagtaaaaacgtttaaaatattttcaacaacctatcgaaatcgacgcaaacggtttggattacgaatgaatttgattgctggaatgatcaaccgtgaactaggattttagtttcgcaggaagtctattcaagaaataagagtaaaaaaacttagctacttaaagtagctaagtttttattcccactcaacagttgcaggtggtttacttgtaatatcataaacaatacggttaacgtgatcaacttcgttaacaatacgtgtcgaaattttcttaagtacatcccaaggaagttgcgcaaagtcagctgtcatgccatcaattgaagtaattgcacggatagcaattgtatagtcataagtacgaccatctcccataacaccgacagaacgtacgccagtattaactgtgaaatactgccatacgtcacgatctagaccagctttagcgatttcttcacgaagaatagcatctgattcgcggactgtttcaagtttttcttcggtaatttcacccataacgcgaatagcaagaccaggcccagggaatggttgacgccatacaacttcatcaggcattccaagtgcagtaccaagagcgcgaacctcatctttgaataatgtgttaagtggctcaatcaattcaaattgcatatcttctggcaatccaccaacattatggtgtgacttgattgtttgggctgtttctgtcccagattcaataatatctgtgtagagggtaccttgagcaaggaaatcaacgcctttaagtttacttgcctcatcatcaaaaacgtacacgaactcatttccgatgatttttcgttttctctcgggatcttcaacaccagaaagaagatctaggaagcgttttgaagcatcaacacggataatattaagtccaaatttaccaccaagcatatccataacttggtcaccttcatttttacgtaataaaccatgatctacaaaaatacatgttaattgatcaccgatagcacgttgtaggagtactccgacaacagatgaatcaacaccgccagatagtccaagaagtactttacgatcgcctacagtttcacgtatttttgcaatttccatatcaatgaagttatccattgaccaatcaccacgtgcgccacagatattaacagcaaaatttttaaggatatcattgccatatactgagtgacgaacttcggggtggaattggataccataaaattgtttttcagtattttccattgcagcaaatggacagtcaacagagtcaccaacgagatggaaaccctcaggaatttcagtgacagcatcaccatggctcatcaaaacaagttgttcttgaggagtgccagcaaagagtgctgattctgagcgtaggcgaagtgctgattgaccatactcacgatgaccagcttctcccgcaggaagaaccttaccaccgagtttatgggtaatcagttgcatgccataacaaattcctaagattggaattcctaattcaaaaatttcttcatcgattccaaaagcgccatcagcgtatacggaatttggaccacctgaaagtacgataccaataggattaatatcgcgaatttcatcagccgtaattttatgtgattttaactcagaaaatacaccaaattcacggatacgacgtgcgataagctggttatattgactaccgtaatctagaacgataattttttggatatcattcaatatagaaatatcagtcattgtttccctttctttgtagctaattttaaaaacagctgtacctataccattttagcatattttatataaattaacatcattaaaataattgattaaacgctttcttatcaagaaatattgcttatgatttttctgaattatttcacgattttagagttagaaatatatagaagtatggtaaaatgaagtgtagattctaggaggagagaatattgttaccagcatatattaaaattcacgacgctattaaaaaggaaatcgataaagggacttggaagattgggcagcggttacctagcgaaagagatttagcggatgattatagtgtaagtcgtatgacacttcgccaatcaattacattgttagttgaagaaggtattttggagagacgagttggtagtggcacctatgttgctagtcatcgtgttcaagaaaaaatgcggggaacaactagttttacagaaattgtcaattctcaagggcgtaagccatccagtaaactaatctcatttcaaagaaaactagcaaatgaaaccgaaattcaaaaattaaatttatcacagtcagattatgtggttcgtatggaaagggtacgttatgctgataaggtaccgttggtttatgaggtagcctctataccagagaatttaattaaaggttttgaacaatcagaggttacagaacatttctttaaaaccttaacagagaatggctacgaaattgggaaaagccaacaaactatatatgctagaaatgctagtgaacgtgttgcttcgcatttagaagttaacgcaggccatgctattttggcattgacacaagtttcatactttactgatggtaagccttttgaatatgttcatgggcaatatgttggagatcgttttgagttttatttagagaataactagtagtttaatgaataacgttttttgaagaagtagctatgtatgttataatggaaaaataaattatatagaaagatttgaggaagtagttgactactttcaagaggtattagttcatgtctcaatcttacattaatgttatcggcgctggtttggctggttctgaagcagcttatcaaattgctaaacgtggaataccagttaagctttatgaaatgcgtggggttaaatcaacccctcaacataaaacagataattttgcagaattagtatgttccaattcattccgcggtgattctctaacaaatgcagttggtcttttaaaagaagaaatgcgtcgtttggattctatcattatgagaaatggggaggcacatcgagttccagcaggtggagccatggccgttgatagagaaggttattctgaagctgttactgaggaaatccataaacatccattaatcgaagtaattcgtgatgaaatcacagatatccctggagatgctattacagttatcgctacaggaccattaacaagtgatagtctggcagctaaaatccatgaacttaatggtggtgatggtttttatttttacgatgccgccgctccaattgtcgataaaaatacgattgacataaataaagtttaccttaagtctaggtatgacaaaggtgaagcagcttatctaaattgtccaatgaccaaagaagaatttatggcttttcatgaagctttaactacagctgaggaagcaccactaaattcttttgagaaagaaaaatacttcgaaggttgtatgcctatcgaagtgatggctaagcgtggtattaaaacgatgctttatggtccaatgaaaccagttggtttggagtatcctgaggactacaaaggaccgcgagatggtgaatttaaaacaccatatgctgttgttcaattacgtcaagataatgctgcaggctctctttataacatagttggtttccaaactcatcttaagtggggagaacaaaaacgtgtatttcaaatgattcctggtcttgaaaatgctgaatttgtccggtatggtgttatgcatcgcaattcttatatggattcaccaaatcttttaaaccaaacctttgctacacgtaagaacccaaatcttttctttgctggacaaatgaccggtgttgaaggttatgtagaatcggcagcaagtggtcttgtagcgggaatcaatgctgtccgtcgcttcaatggggagagtgaagtagttttcccacaaactactgctattggtgcactgccacattatattacacatacagacagcaaacatttccaaccaatgaatgttaactttggtatcatcaaagaattagaaggtccacgaattcgtgataagaaagagcgttatgaagctattgctacacgagctttgaaagatttagaaaaatttctcaactattgatatattcatttgactttgccaacaagcaaggtcaaattttctatattgatttttaaaaatgtatgaatggagtaaatatgcactataaagaattacttgagtcatccgaaaaagcttatttggaaactaatcggtataaacattttaagaatataatcatttcagagcgttatttttcaaactatattagctacaaaataatgcctacagtaagtgagtttttacaggatatgatctatttagcagatgaacaaaaagattatcagtctgattttgcttttgtattttttgaggaaaatgctgaattgagcagtgaattacagagaactttatcacaacaaggctttgaatcagagaaacatatcatatttacaaattcattaaatcatcttaaactttttgaaaaagaatttgatgacatcacatttactaaacttaatgaaaattacctagaaaaatacctaaagttcaaatataaacaaagtatagtttacggagaaatttacgctaagcaaatgtataatgataatcgtgttaatcttttaaataataatgctaaagtttacctagctattaaagataatcaaattattggagatgtaacagcttgggactatggtgaatacgtggaaatagatgatttttatgtccaagagtcctacagaggacaaggaattggtacgcgcctacaatttgatgcaagtagggggtttaagaaagttatcttaatttcagaagaagaaaacagaaaaatgtatgagcaccaaggttatgaggaagtcgcctattattggaccgctttacggagccctcgaaagtaaaattataaaagaaatgatatagttaaaagctatatctcttgattgataataagtattttttaatccattagctttttgttacactagtatcagttgattaatcatacaaccatatcaaaggagaaataaattatgaaaatcaaaaagctattagggttaacgacaacagtagtaatttcagcacttattttaggagcctgtggtcagtctaaaaatgaagacgccaaagtcgttagagttggaacaatggtaaagagtaaaactgaaaaagctcgttgggataaaatcgaagaattagttaagaaaaaaggcgttaagctaaaatttacggaattcacagattatacacaacctaataaagctttagaaagtgatgagattgatattaatgctttccagcattataattacttaaacaattggaataaagcaaataagaccaatcttgtttccgttgctgagacatactttacttcctttagattatactctggtactaagaacggtaaaggtaaataccaaacagtttctgaaattccaaataaagcaactattactatcccaaacgatgcagttaacgaaagtcgctctctctacttgttacaatcagcaggcttgctaaaattgaaagtatcaggtgatgcattagcaacaatgtcagatgttgtttccaatcctaaatctttagatttaaaagaagtagatgcagcacagaccgcacgttctttggattccacagatgcagcagttattaataatgattttgtgacagaagcaggaataaatcctaaatcagctatttttattgaaccaaaaagtaaaaatgcaaaacaatggtacaaccttttagttgctcaaaaaggttggcaagacaaatcaaaagctaaagccattaaagaagttgtgaaagcttaccatacagatgcggttaaaaaagttatcgaaaaaacatctcaaggtttagatcaacctgtttggtaaaaataaataagcatggtcaattcgatcatgcttatttatttcgattttttttgagtaattgactaggggtactcaatacttctgttaaccgttgttgtcgtgctttacttttttcggatttagataaaagtagtgtcttactttcttcaaggatatcctctgtaatatagtacaacttcactaatgaaccgattctgaccctaccagctttaggcgacatattcacaacttgattaggatgtagggttgcccactttgaatttggttcagcaacaatccttgatacattaaaatggcgttgctctaagtaaacttgcgcatcattgatatcaaggtgtactacattatcaagctgagtataagtctgtttttttttcatgacgacggtcaagttctttttcaataattggacgagaattatcaattgcttttccaataagttcagttgtgtcagggattattgaaattaatttaccaataggccctaaagattttgtcaattttttacttgtcttggccatatgttttcaccgtactttccatttgttatgtaagatattatatcaaaattatagtttataaagcttttaaaactttcaaatttgtaagaaataggtcttaagatgtaaggttatagtaaaccattttgccatataatagacttaaagagaaagggggagcaagagatgcggcgaaaaatagttttactttttgtagttccaatgcttatagttttaggaattttaggagtggtagttcattattatggttcagcattaaatatttatctattacctcctagtagcgaacgttatggacgtgttattttagatcgtgttgaacagcgtggtttgtattcgcaaggtcgtcaatggcaaattataagacaacgatcagaaaaaaagttgaaaacgtcaaaatcttaccaagagagtcgcaacattgtacaggaagcagtacggtatggaggcggtaaacatagtcaaatattatccaaagagactgtacgaagagataccctagatagtcgatatccagaatatcgaagattaaacgaagacattctcttaattactattccttctataagtaagttagataaacgatctattagccattatagtggtaaattacaaaatatattgatggaaaaaagttataagggactcattttagacttatcgaataatactggcggcaatatgatccctatgattgggggggtagcctctattttaccaaatgataccctatttcattatactgataagtatggaaataagaaaacaatcacgatgaaaaatataccgctagaagcattaaaaatatctaggaaaacaatcaatactaagcatgttccaatcgctattataactaatcataaaactgctagttcggcagaaatgacttttttatcatttaaaggattacctaatgttaaaagctttggtcaagctacagcaggatatacgactgttaatgaaactttcatgctttacgacggtgctagattagctttaactacaggaatagttagtgatcgacaaggatataaatacgagaacacccctatcttaccagatcaagtaaccagccttcctttacaagagtcacagtcttggttaaagagtagaatcaatcaaaattagggtataataaataaaggagaattatatgttattagaaatcaatcacttagaaaaagtttttcgtacacgtttttcaaaagaagagacaagggctctacaagacgtcgattttaaagttgaacaaggggaattcattgctattatgggagagtctggttcgggaaaaacaactctgctaaatattttagctactttagaaaaaccgacaaatggacaagtgattttaaatggggaagatattacgaaaattaaagaggcaaaattagcgagttttcgtttgaaaaatcttggtttcgtctttcaggacttcaaccttttggatactctctctgtaagagataatatctatcttcctttagttcttgatcgtaaacgttacaaagaaatggatcatcgtttgtcagaattatcttctcatctgagaattgatgacttattagataagagacctttcgagctctctggtgggcaaaagcaacgtgtagcgattgctcgtagtttgataaccaaccctcaaattttattagcagatgaaccaacagcagcgttagattaccgtaattcagaagacttgctgaatttatttgaaactattaacttggatggacaaactattttgatggtaacccattcagcaaatgctgctagtcatgccaaacgcgttttatttatcaaagatggacgtatttttcaccaactttatcgtggtaataagaataatagcgaattcaataaagatatttctttaacaatgtctgccatattagggggtgaataatatgttttatctcaaaatagcctggcataatttaaaacattctatagaccagtacataccattcctcttagccagtttattactttattcattgacttgttctacgctactaatcttaatgagtgctgttggaagagatatggggacagcggcaacggttctttttcttggagtgattgttttgtcaatctttgcggtagtcatggaacattatagctacaatatcttgatgaaacagcgtagtagtgaatttggactgtataacattttggggatgaataaacgtcaagttgcgcgtgtagctagtctagagctgtttattatttatatatttcttatttctataggaagtctgtttagtgctttttttgctaaatttatttatttaatttttgtcaacattattaactatcatgcactaaatcttagtttaagtttatggccatttattatttgtatcgttatatttacaggtatttttctgactttagaagttccagttattcgacatgttcatttatcatccccattaagtctttttagaaagaaacaacagggagaaaaagaaccaaaaggtaatcttatacttgcaattttagcgttagtagctatcgccatcgcttatacaatggctcttacttcaggtaaagcacctgcattagctgttatctatcgtttcttctttgcagtacttttagttattgctggtacttatcttttttatattagttttatgacatggtacttaaaaaggttgcgtcaaaacaagcattattattataaatctgagcattttgtatcaacttcgcaaatgatttttcgaatgaagcaaaatgcagtagggttagcaagtatcactttattagctgttatggctctagttactattgctacaacagtctcactttattcaaatacacaaaatgttgttaccggactatttccaaaatcagtaagtttatcaatagataattcaaaaggtgacgcgaaaaatatatttgaagaaaagattttgaagaaactaggtaagtcatctaaggaagctatcacttataatcagacaatgatttcgatgccagttagtcaatcaagtgaacttaatatcacatctaaaaacgtcaaacatgttgatatcacaaaaacgggttttatgtacctaattactcagaatgatttccgtcgtttaggtcaccaattaccaaaattaaaagataaccaagtggcttactttgttcaaaaaggtgatagccgtttgaaaaaaataaatctattgggaaataaatttgacgttgtaaaaaatttaaaagaggcttatgtcccagagactacaaatacttacaacccgggtttgattatatttgcaaacaacaaacaaattgacaatattagaaaagcatatttaccttatactaagaacatcaatacttttccaaaaacctttaaggcatatttggatttgaatagtcaagagataaattcaatttctaaaaacgacataatagaggtagatggtaagtatgttggaaatattagcactaaacagagttttctaaaagaaggttatcaaatgtttggtgggttattatttactggatttctgttaggtataagctttttgctaggtatagctctaattgtttactataagcaatactcagaaggtcatgaagataagagatcttatcgtatcttacaagaagtaggtatgagcaaaaaattagttaaacggactattaattctcaaattatgattttcttcttccaacctttagtggtagcagttattcactttggagttgctattccaatgctaaaacagatgcttttggtatttggggtgcttaactcaacaatcgtatatgtagtaagtggtttgacagtacttgcgatttctataatttactttatcatttaccgtataactagtcgaacttattatcatattattgaacgctaaaaaggattggttattttaccaatccttttgcattaatagaaaccgatagactaaaaaatttgttatactaaatgaaagaaagagatttcgtactattttaggaggggatatgtcacaagagcaaggaaaaatttatattgtagaagatgatatgacgattgtgtcacttttaaaagatcatttatcagctagctatcatgtctctagtgtcagcaattttcgtgatgtgaaacaagaaattatcgcatttcaacccgatttgatactaatggatattacgttaccctattttaatggtttttactggactgcagaattgcgtaagtttttaacaattcctattattttcatttcatctagtaatgatgaaatggatatggttatggcattaaatatggggggtgatgactttatttcaaaaccattctctctagctgtattagatgctaagctaactgctattttaaggagaagtcaacaatttatccaacaggaattaacttttgggggatttacgttgacaagagaagggttattgtctagccaagataaagaggttattttatcgccaacagaaaataaaatcctatctatcttgctcatgcatcctaaacaagtagtctcaaaagagtctctattagagaaactttgggaaaatgatagttttattgatcaaaatacacttaatgttaatatgacacgcttacgtaaaaaaattgtcccaataggttttgattacattcatacagtgagaggagttgggtatttactacaatgatacgccagtttttaagagaacacttgatttggtatattttatatatcatgatgtttgtcctattttttattagtttctatctatatcatttaccaatgccctatttgtttaattccttaggtttaaatgttattgttttactaggaattagtatttggcaatacagtcgttacaggaaaaaaatgttacatctcaaatattttaatagtagtcaggacccctctttcgaacttcaaccgagtgattacgcttattttaatattattacacaattagaagctagagaagcgcaaaaagtttctgaaacaattgaacaaaccaatcatgttgcacttatgataaagatgtggtcgcaccaaatgaaagttccattggcagctatttcattaatggcccagacaaatcatctcgatcctaaggaagttgaacaacaattattgaaattgcaacattatcttgaaacgttgttagcatttttgaaatttagacaatatcgtgacgattttcgttttgaagctgttagccttagagaagtagtagtagaaattataaaatcgtataaggttatttgtctatccaaaagcttatctatcataattgaaggcgataatatctggaaaacagacaaaaagtggttaacttttgctctttcacaggtgctagataatgccataaaatattctaatcctgagtcaaagataataataagcataggagaagagagtattagaatacaagactacggtatcggcatactcgaagaagatatccctagactttttgaagatggctttacgggttacaacggtcatgagcaccaaaaggcaacaggcatggggttatatatgacaaaagaagtcttatctagtctgaatttgtccatttcggtggatagcaaaattaattatgggactgctgtttctatacataaataaagttatgtaaaataaaatatttacataactttatttatgttactatagtttatctaaagcgttcttttgttcatcgttaacaatatgggtatataggtcagtaacttgagtggaagcatgacctagttggtggctaactaatacttgagattttgtagcatcatatagcctagtagcaagagtatgccttagtttatgaggtgttacacgaaccttaaaatcctgggaatacttagcaaccattttctctacacttgaagcatcaatacgatttggcaccccacggtattctgataaaaatagagcaatgtcctgattttctgctttgtatctatttttacggatgtctaaataattagcaaggtagggcttcgcaaagctagcgacattgacagagtcccttttccccccttttcgtgtgacatcaataaccattacattaaggttaatatcctttaaatctaagtttactgcctcagatagacgcactcctgaagctagtagcaaagcaataatagctaaatctctctctttatttttgttgaaaaaagctaaagcacgtttggaaagtttgttttgatattcacaatctatatactctaagaattctatcgtttcattgcccaaaaataacttttgtttaatattttctgcccgagaagctaaagtttcctttttctttttggttgagacttttttcatgacattgcgataaaagtaaggctccccgtcagcattctcaacctcttcagtaaggtatttgaaaagactagataaggcagatagagttctgttaatggtggtttgagacaccccattttgccttgtgttagcatttaataaagggcgttctcgtaaatatagtataaaagcttccatatcttttttagtaaggttttctaaaactgaaagctcaatttctgcaatgtgatgacaattagcaacaccagaatccaataaccattcaagaaaacgtctatattcttttaaatattcgtagagtgttgtgaaactataaggaacagaaagctttgattgataatattctagaacataccaaggcataatttcttttagttcatcgattttttcgagtagtaattcacgtttcataataaaatctccattatatctataaatagaagtatatcatactctatcataactttcaagaaaattatagtttttcggaaagtttaaaagttaaaaacaggaattcattcggtaagtatatcaaatatccattctttatgatgatcagtattacttattatcgtttaacatgtttgttatagtaaagacagagtattttgagaaaactgattcataatttcattgattttatcggtatctgaaaaggtaataaagtgtactcaattatttttaattatatttgcaagttaataaccaaagttaaattctactttaaaatatactagttttctcaatattagatctactatgtcttataaaaatcagaagatttgaaatatttctttctttcttgaaattttatgatataatatgtcctatatctttatagaaggtttaggaggactggtattatgtctagttttaatagaaaaaaacttaagtttttgggtatatctttggcgactctaacagccaccacagttaccctggttgcctgtggtaatgagtcaaagaactctggagataataaagttattaattggtatattcctactgaaatcagtacattggacatttcaaagaatacagatgcttattcaaacttagctataggtaattcaggcagcaatttacttagaattgataaagagggcaaaccaaaacccgatttagctaaaaaagtatccgtttcttctgatggtcttacttatactgctacacttcgtgataatttaaaatggtcagatggaagcaaactaagcgctgaagattttgtttacacatggcggagaatagttgatcctaaaactgcatctgaatatgcttacttggcgacagaatcgcaccttttaaatgctgataagattaattctggagatattaaagatttaaataaacttggtgtaacagctaaaggcaatcaagtgacctttaaattgacaagtccatgccctcaatttaaatattatttagccttctctaattttatgcctcaaaaacaatcgtatgttgaaaaagttggtaaagattatggtacaacatcaaaaaatcaaatttactcaggtccttaccttgttaaggattggaatggttcaaatggtaaatttaaattagtcaaaaataaatattattgggattctaaacatgttaaaacaaatagtgtcatagttcaaactatcaaaaaaccagatactgcagttcaaatgtacaagcaaggtcagattgattttgctgaaatatcaggaacttctgctatttatcaagctaataaaaataataaagatgtagtagatgcgtctgatgcacgtactacatatattatttataaccaaactggttcggttaaagcattgacaaatcagaaaattaggcaagctttgaatttagcgactgatcgtaaaggtgttgttaaagcggcagttgatacaggttcaactcctgctgaatctctggtccctaaaaaattagccaaattacctaatggtgaggatctttccaagtatactgccccaggttatacgtataatacaagtaaagctcaaaaactttttaaagaaggtcttgctgaggttggtcagtcatctctcaagttaacaatcacagctgattcggactctccagcagctaaaaatgctgttgactatgtgaaatctacatgggagagtgctttgcctggtctaactgttgaagaaaaatttgttactttcaagcaacgccttgaagatgcaaaaaatgaaaattttgatgtcgtgctcttctcatggggaggagattatccagaaggatcaactttctatgggttattcacgactaattctgcgtataattatggtaaattttcttctaaagagtatgacaatgcctatcaaaaggcaattactactgacgccttgaaaccaggagatgccgctaatgattacaaaactgctgaaaaagctttatttgatcaatcatattataacccagtttattacctagggaaaaaaggactccaaaattctaaattaaaggggttggtaagaaattcaactggtttgaatgttgattttacttatgcttataagacagaataaaagaaaagcgttaggatatttctagcgcttttctataccaaaagtaaccaatgagttatcaaaacacttataattgagaacaatgatccaattaaataatattcggcaaaaacctgacttttagaaattttatcgtaacgtgcaatggattttgcagtaaaaacaagacctatagcagcatactgtcctgagattagtaatatagccataattagacgctctaaattaccaatcatagctcctgctccttcaattgtttcttcatgatcttcagatttttctttcattatttttgttttttcttgtgttaataatgatgataattctttagcttgaaatttattaaagaaaattttaaacacaatattaatgggtttggtgataatgataaaaaccagagctatgacaataaagtgcttgataggcaaaagccaatgattaggcggtaaatatgtaggaagcgcatggtaaaaaacgataatgcaagtatagtgggctagttggtctataataaaagctgctttttggaaatgcccttcctctacccaagggtaactcaatttctttatactatcaataacaatatgacttccccatatgcttaaatttaacaaagtagtttctggtatcaatatcattaaagctgctagggggaggaaaacaatcaagagatgtctccagagtcccctccaactatgtgatttactatctgctaaggattgactttgccactgaaagtcagctaaaaaatgtgcacaaaataataaagttaggattggattatcccttaaaaaatcagaaatcatagcttccccctttagtttgagtgcaacttttaactaatagatcggctgcctgtgttctcgttcttaagtaaatcttcagaccgcttgctttaaggcgtttagtcagcgcactaggttcaatattttccagttgggctaacttttgatgttgaaattgttcttgataattatcttgaagtattaagtgctcaagcatttgaaaatggtttgtagtccattttgacttgataaaatcaccagctgaaatgagactatttagtgttaattcaaggttttggtcttcatcatcaaggcaaatagctacttgaactgttccataatcatttttatcatgtatatgattaatagctgagcgagcatgccagtaggcaggaccatcagcaccgatactttcatttgaattgatggatgttataatgtttcctgtaccgaggccgaaccttacattaacaggttttagagctagttgaatatggtcaataatttgaaataccttttttgatggtttcaataaagcttgaaattcatcaccagctgtaatagtgaatggagaaatcagctcttcaccatatacatcagatagttcggtcattagttgctgaaaagactgttggaaagtttcacgttcaagtatctgttttgaattaatgatatcaccgattaatgctaaatacataaatatcaccacctttttgtctattatagcagacaaaaataaaaatgtctatttaaatagacatttttatttgcgtttcttcttagctttcttcattttattagccatacgtttcattgattgtttagctgcaaaggctcctacttttccttttaagccaccaccaaacatttggctgaagtccatatcgccacctaaactagataagtcaggcatgccattttgccccatcataccttctaaattagacatatccattccgtccattccaggcatatctttagggaggttattaggatcaattcccatttttttcatcattttattcatatcaccggacatcacgccttgcatcatttgttttgcctggttaaaatctttaatgaatttattaacatcaacgaaagtattacctgatccagcagcaatacgacgtctacgacttggattgaggagatctggattttctctctcttctggagtcattgatgacacaatggctcttttgcgagcaatttcgttttcatccactttgaagtttttcattgctggattgttagccattcctggaagcattttaaggagatcttccattggccccatattttgaacttgatctaattgatcaataaaatcgttgaagtcaaaggtgttttcacgcattttctccgctaattccattgaacgtttttcgtcgtattcttgactagcgcgctcaataagtgttagcaggtctcccatccccaatatacggcttgccatacgatcgggatggaaagtttcaatatcagtgattttttcccctgtccctgtaaatttaattggttttccagtaatttcgcgtactgaaagggcagcaccaccgcgtgtatcaccgtcaatctttgtcagaacaacaccactaatgctgagctgacggttaaattcttcagcgacatttgcagcttcctgtccaatcatgctgtcaacgacaaggagtatttcattaggttgagctatggctttgacatcatgcaattcctgcataagggttgcatcaatttgtaggcgtccggctgtatcaataagaacatagtcattacgattttcacgagcctgttctaaacctttagtgacaatctcaactgctgaatggttagttcccatatcaaagacaggaacattaatctggctaccaagggtttttaactgatcaatagcagctggtcgataaatatcagctgctatcatcataggacgagcattgtcttctttgattagtttgtttgctaacttaccggcaaaagttgttttaccagcaccttgtagaccaaccatcataatgatggttggaattttaggggatttttcaatttcagaggtctcagcccctaataaatctgttagctcttcattgacaatcttaacaatttgttgcgtaggatctagtgtatcaatgatttcatgtccaacagcacgttcacgaacatgtttaataaaggttttaacaactggaagagcaacgtcagcttctaaaagagctagacgaatctccttggtgacttcttgcacatctttttcagataactttttcttaccacgaatatttttaaaaactccttgcaggcgctctgttaaactttcgaaagccataaattatttctcctcatttaatctctattatcaatgctacttagaatggaaattttttcttgtaaaaaggcatcatcggtatatttttctagaatgtcatcaaaaatctgactacggacaatataatctgaatacatatgtagtttcatttcgtacgcctcaagaattttttcagttcgtttgatattatcatagacagcttgtcggctaacaccggattcttcagctatttcagcaaggctgtagtcatcggcgtagtataactcgatataattcatttgtttatctgttaataatgccgcataaaactcaaaaagggcattcatacgatttgttttttcaatttccatagcttttattataccaaatttcctatcagcttgctatatcaagtatgcaagaccactttaaaatttaaaaggttaggactaacatggcctaaccttttacttttggtagttttatcttaaaaatactgcctctaggtttattatcaattactgtaatattacctcgcagtgagttaacgatttgttgagctaaagaaaggccgaggccaaaccctccttgttgtcgtgttcttgctttgtcaacacggtaaaaacgatcaaaaattctgactttatcctcctctgaaattcctggtccattatcagcgatttctaaaaagagatacttatcagtttcagatatggtaaagtcaatgctaccatcattgtcagtatattttatagcattatcaaataaaatagtcatgagttgttttagcagtgtcttatctgttttgaaactatcttggatcatattatgtccagtaaaatttttaccattctcttgggtgattagatcataattctcaaagatactatcaaaaagtgtaggcttaataacagctaattctggtttgattccatcatcacgtcttgctaagtttaaaagattagtggttaaaatacgcatatttcgtacttcatctagacttgaagcgatattttcactattttctaaaatggtggcattcggttttctgaatagcgtttctaggcgattttgtaagacagctaggggagtacgcagctcgtggctagcattttcgacaaaagccttctgtctttcgtagttttctataatcggtttttgtgcccatttagctaagtagatacttgctccaattgaaataatccaaaaagtagtcatgacaaatataataattttttcatagcgttctttagcatttactaattgatcaatattaacaatagctgtcatgtaagtcacattaggataagcagggttattaacttttacggtgacagcatgatatgtctcatcttgaccaaagatgttggttaaagttaattcactaatgccacctagattttttttattaggttttaaaaactgatagtttgaaaatgcgtcaaaatagttaatgacttcttcttctgatgtaaaaagaataatatcagtattagctactgtctgaccgccgggttttaacttgacacttgcgatattggagttatctaggtaggcagcagtacgtgacataaccatattgatgtaatttttaggatgggtactgatatactttaaactactatcaacagaagaataaacaccatagcgcatgacttggaggatgataacagtcataaccagaaaaataccactaaaaactgtgaaaaaatggataaaatgactatctgagacattttttttgaatttacttatcttaatcggtttcgacatgctttaaaatatatcctacactacgcaaagtttgaaggttttctgaaaaaagtgttccttttaattttttccgaaccttagagacatagacttctacaactgaaatcgttgtatcactatcaaatccccaaatacgatcaaagatttgagatttcggtaagataacattttgattttgaaggaaatagactaaaagatcaaactctttacctaagagctcaacttctgtttgattaacaaaggttgagttagtagacatgtctacgcgaatatcaccataaattaggctgttatcattaaattttccagaacgctttaaaagagcctgaattcgcatttttagttcttctaggtaaaaaggttttgttagataatcatcagcacctaagtcgaaaccttgtcccttatcatcaatgctttctttagcggtcattattaatacaggggttgtaatacctttttcacgtagctctttcaacacttggaagccgtttttttcaggtaacatgagatctagaagaatcagatcatagactccactttcggcttcgtaaagaccctcttctccatcaaaaatttgcatgacatcggcaaagtcatcaaggaaatcaaaaacggaattggaaagactcaagtcatcttcaattaataaaatttttatcatagtatatcctttcgatgtacatattttatctgaactattaatattagaataccaaactttgcttaataaatcctaaataaagtatgttttatgtcaactaatttcatgacacagacaaagaaatagagattgaataatccatcaatctctatttgagtttattagatatattttttgatagtattgataacttcttctttttgcttcgtgattaaaaggacacgagcagaaatttctttaattcccattgaaatattacggctaatcgccatatcgcttaattgaggctcgaaaaagtttttatattgttcaaggcgttcttctgttttgaaactacttgagggataaatcacaaatttatcaaaactcatatcaccacctagagttgctttgatccattcccagttttcttgggcccactcccagacactttcttgtgtaaaagaatttttaaggaaagtagcataccaactcatagctaagtcttgtggtttcacaatatctttatttttccaatctgacaataatttcttgagtgtcttgctatctgtagtatgagataaagcactcgctagttgtcgtttgaaattcccatcggtagtagtactataagtctctaataacaagtggctaagttctttggattcgaaatgcttcatttcattggtaagaactaacaggcgaattgcagctggtatagcagcgatattattttcgtgggctttaaaaatatggtgagcttcttcaatagcatgttcattatctgagtagagagcaaggcttagggatagatgacggaccatttcgctatcatctccttctccttctcttttttcaaagccaagtctattaaaattaaatgctgataatttattaacaaattctttaaagtcgaattcatcttggctatcttcctggacgaataaggataaaccatcaataacactcttaatagcagagttaacaagatatgatgtctcttggctcaaaagagagactaaaggtattaaactactatatgaaatcataccactttcagcaagtaaatgacgttcttgtacaatttgtagtttagaaatgttatccataagaggaagatcagaaatgatatgctctaagagttgaccttgatagttagtaatgtaatgtgcagtattttcagtattgaaacgcagtgcaccattttctttgttcttttcagctaactgactaaaattggggattactaccgtttcctcggttaatatctctgggattccttcccaattactattaagaggaatttgccacaagcgagacttatcttcgtgttcaccaataaagaattgtttttgagttaaaatgagctcatcttcttctattttggctgccatcacagggtatcctggttgctctaaccaagaatccatgaaagctgcaacatcttttcctgaggtttgagaaagtgcattccaaaggtcacgaccaatagtattttgatattgatgtttttcaaaataaatttttagtcctgcggcaaaatctgtatcgcctaaccagcgacgtaacatgtgcatgaggcggctaccttttgcataaacgatagctggatcaaaaagtgtgttaatttcatcaggatgattgacctcaacgtgaacagattggacgccatctgtggcatcacgcttaagagctaatggtagaccacctgtttgaaagtcttcaaatatattaagttttggttcaatataatcaattgatacatattccatcatattagcaaatgattcatttaaccataaatcatcccaccatttcatagtaacgaggttaccaaaccactggtgagctatttcatgtgctacaactaatgctacttgctgacggctggaaacactagagttctcatctactaaaagatagacttcacgatatgttactaatccccaattttccatagctccagcagaaaaatcaggtagagcaacgtggagtgactgaggaataggataacgtacaccaaagtagtcctcataaaactcaataacacgcacaacgatatctaaagaaaaatctaattcatttaactgatgggcttttgtggcatatgagccaacaagagtgccgtttttggtatgtgttgttttaccatgcaattcccccaaggcaaaagctaataaatatgaggacattttaggtgtggtgtcaaatgtccataaacctgtttcttgacgttgttcagcattgatttccggcatatttgaaagagcaatctctccttctttttgatcgaattttaggctcaaatcaaaggttgcttttgcttctggttcgtcaatacttgggaatacttcacgagcaaaatgactttcaaattgtgtggagataacctcttttttgatgccattaactgtatagtaagatggatacatacctgtcatattatcggtaatgtgaccgctgaattcaaagactaataccatgctaccagtttcatgcaattgaatatgcatagcttcattgtcttcatctagttggaaatctaatggttgattatctaataagacagatttaatggttaaccctttttggtgaaaagagatattgttatctaaggcttcgccagacacagcaacgttacctgaaaaggttttagtttgacgattaatatccaagaaaaggttatagttttcagggacaaatttggtaacaaaatgttctacagttttcatataactcctaactaattcagaaacatttgaaacattactagtcctgtatgggctagaaaagatagaaaagctgtaacaagatagttacagcttttctatcgcacgaactatacttacaattaccactctacaagcaataattatatcataactcgataatttttccagtttttaaataaacaatccattcacagatatttttgccataatctccaattcgctccaagtgcatcaatacttggaagtattctttggcggcaaatgctacgtcaggatgcttttgaattgtttcaactaccattttttggatatcacggaagtaatcatcaactatttcatccattgctgctacttcgtaagctttttcatcatcaccattgatataagctgttaaggcttcttcaagcatgtttttaactgcttttcccatattattgatttctaattctactgctgggattctttcctcgcccttcatacggatggttgcttttgcaactgctgctgcatggtctcccatacgctcaacatcactagtagcttttaaaacggtaataacggtgcgtaagtcttgtgatacaggctgctggagtgcaataatttccaatgattttttctctaacttcgtttcaaagttgttaagcgttacatcatcttctatcacttctttagctaactctcgatcatgactgacaaaagcacgaactgtttttttgatttgtccgatagcttcaattcccattgcatagaattggttatgcagtttatctaattcttcatcaaattttgatcttaacatattgtattctctttctgatcttattatatggtattaaccgaatttacctgtaatgtaatcttcagtttctttatgtttaggattcataaacatttcttttgtattgccatattcaattaagttaccgtctaagaagaaacctgtacgatcagaaatacgtgaggcttgctgcatagaacgtgtaacaagtaacatggtatattgatcttttagaccatgtaaagtctcttcaattttaccagcagaaattgggtcaagtgcagaggttggctcatctagaaggataattttaggcttggtagcaagggttctggcaatacaaacacgttgttgttgaccaccagataaaccaagagcagagtcgtgtaatctatctttgacctcgtcccagatagacgcgcccttcaatgaagtctctacggcttcatctaacgtagctttgtcttttattcctttgagtctaagaccataaacaacattttcaaatactgacataggaaatggattaggctgctgaaaaaccatcccaatttctttacgaagttctacggtatcagtgcgcgggctataaacattatgtccgttatacatcactgctcctgttagagtgacttcaggatttaagtctcccatacggttaatagctcgtaagagtgttgactttccagaaccagacggaccaattaaggctgtaatttcattaggatagaagtccattgagacttcttttaaagcttttttcttattatagtaaacagacaaatcactgacttgtaaaataggttgtgtcatcttttacctcactatccaaatcgaccagaaacataatcgctagtagattgacatttagcattttggaaaatgttattcgttttatcgtattcgattaagtctccaagatagaaaaatgcagtataatcactagcacgtgctgcttgttgcatattatgtgttacgataattatagtgtaatttttcttgagttcaaacattgtctcttctagttgcatagttgcaatcggatcgagtgctgaagcaggttcatccattaagagaatttctggtttaactgcgatagcacgtgcaatacataatcgctgctgttgaccgccagataaagtgaatgctgatttatgaaggtcatcttttacttgatcccatagagcagcttgttttagtgaggtttcgacaacttcatctaagaattttttatcttttacaccagcacgctcatatgcaaaggtaatgtttttataaattgattttgcaaacgggtttggacgttggaaaaccattccgatatgttttcgcatctcgtaaacattgatatcttgagcgttaacatcaattccttcatacatgatttgtccagtcacgcgtgcaatatcaatcgtatcattcatacgatttaagctacgaagatatgttgattttccacatccagatgggccgattaaggctgtaattttatttttttcaaattgcatatcaattcccttgatagcttctttctcaccgtagtaaacgtgtaaatcttttgtggtgagagctgaattttcttcagggaaggtaatgatatggcgttcgtcccaattatattctgccattactactccttttaattagacgaggttaatttcgaatgaagtttcttaccgatcgagcgagctgaaaggttgaaaataagaataacaaccaataagactgcggcgctaccggcagatacttgtgttgcatcagggattgtcccttcgctattaactttccaaatatgaacagctaaagtttctgcttgacggaaaattgagattggacttgtaacactaaggacgttccaatttgaccaatcaagtgctggagcagattgaccagctgtataaataagtgctgctgcctcaccgaaaatacgtcctgaagctagcacaacaccagttacaatacttggcagagcttcagggacaacgacgtaaatgaccgtttcccaacgagaaatacctagggccaatcctgcttcacgctgtgtgtggtgtacattttgaaggctatcttcaacactacgtgtcatttggggtaagttaaaaacagtaagtgctaaggcacctgagataattgagaagccatattgaaattgaacaacgaagattaggtaaccaaacagaccaactacaacagaaggaagagatgacaaaatttcgatacatgttctaacaaagtttgttaaacgtccttttttagcatattctgagaggtatattccagctcctaaagatagaggaatagaaataatcagagtaacaataagtaggaaaaaggaattgtataattgtattccaataccgcctcctgcttcatatgatgatgatttcccagttaaaaatgaccaagatacgtgtggcaatccgcgaacaagaataaaaattaaaagagaggcgaggattgtaacgatgatagctgcaatactatagagtattgtagttgctaatttgtcagcctttttagcgttcatagtttttctttccttcccttgtaattaacttaataactgtattaaatgctaaactcataattaaaagtactaaggctagcgaccagaggacattgttttgtacagttcccattacagtattaccaatacccattgttagaacagacgttaatgttgctgctggtgttgtcaatgacgttggtaaaattgcagagtttccgacaaccatctgaattgctagagcttcaccaaatgcacgtgccataccaaaaacaattgcagtgaaaattcctggacgtgcagcgtttaatataacacgccaaattgtttgccaacgagttgcccccatggctaaacttgcttctttatagtgacgtggcacagctctaaggctatctactgtcatgaaagtaacagttggtagaatcatgacgaagaggacacagaccccagataaaatgccaaaacctgttcccccaaaaatagagcgaacgaagggaacaataatctgtaaaccaataaaaccgtaaacaacagaaggaatcccaactagtaattcaactgcaggttgtaaaattttagaaccatatttaggtgagatttcagtcataaatacggcagcaccgatagcaaatggtgtagcaatgatagctgatagaatagtaacaataaatgatccagctatcattggaaaagcaccaaatgacttagcacttggttcccattttgtattaaataagaagtctgttaatttaacgccatcaacaaaaaatgtagatagtcctttttgagcaacaaaaatcaaaatcatcgcaacaatgaagacgattagggcaagcgaaagaaaagttattcctttaccaaatttttctaatcgagagttttttgaaggagatgttaattttttagctaattcttgatttttcataattcctcctaggatcaagatgctttatctagatgtgattaagttttattttggggttactttaccttcagcatctttaacaactttcatgtcgttaatagagatatatcccatatgttgtacgatactactttgaactttatcacttttcatgtagtctaagaattcttttgttagacctgtttcattaccttttgtatacatatgttcatatgaccaaagtttccagttgtcggtagtaacatttttagctgttggcgcaaaaccatttagttttaatgttccgacagatttatcaacgtatgcaaaagcgaggtatgaaatcgcaccaggtgtttgagaaacaattgatttcaccataccatttgaatcttgttcttggctttgaataggagcaacatttcccataatagtattatcgaaggttgcacgggatccagaacttgctgctcgattgatgatggaaatatctaaatcttgtcctcccacttctttccaattcttgatttttcctgcaaaaatatcacgaagttggtgggtggttagatttttaacattaacttttttattaacaataacagctaatccagctactgcgacttgatggtctttcaatttcttagcatcaataccatctttttcttctgcaaataagtcgctattaccaatttgaacagctccagactgtacttgtgataagcctgttcctgagcctcctccttggacattgatagtcttaccgaggtttgtcttaccaaactcatctgctgcagcttctacaagtggctgtaaggcggttgaaccaacgctggtgattgattgacctttatcaatccaattagcacaaccagacagcgtcaataagacggtggctagcaaggttaacaaaaaaatgttttttttcattttcattttcctattcttttgaataaattttgatatttagtagttgatatatattactaaaatcattgagtgtttaatgatttacaaatagtaaaaacacacatcactgtcccatagtaccataagtttctagggtttgaaaagtatttctttttccttttttattaaaagtattcaataacagttatgtctgaaatcgtagtcctttagggtaataatttttaagagtattatttgtcacttttgcaaaacctaatccattgccttttacaagaatttgataccaaccgtttggaacagtcttgtctagtttgactacatttccagatacgtacacctcaaactgttctatatcaatttcaatagactgtactaggtcatgttcgctaagtgccattcctaaagcaaacgatggctcaaaacgattcttcttgaaagtgcctagatggagaccattgcgtgctatttttaatttagacaaatcggggagaccattaggtagaagatagagttggtcgccgaaaacatctaaaacaccgttcaagtctatctttaaatggtcttgtgcaaattgttgccacaattgtaactgcattttatttattttctgtgcttttggcttaattttctgtgcttccttagatctagtatctctcagttttgcaacgaattgtccttcaccttgaaaatgatgagggtacatccttgcaacttgtggtacattaatcccttcaaccatcccatttagtttaggaatatcaacaagttctaagtaatcatactcttgaaggagccaattaaccacttcttcgttctcttctggtgaccatgtacaagtagagtatacaagtataccaccatgagctagcattttgattgcttcttttaaaatatctctttgtaactgtgcacattcagtggggtaatctttgtgccaatattgtattgcttgaggatctttgcggaacattccctcaccagaacacggaccgtcaaaaacaataagatcaaaaaaagaattaaaacatttggctagtcgttgggagctttcattagtcacgataacatttctagcaccaaaacgttcgacattttcgactaaaattttactacgtttatttgaaatttcattactaactaatagaccagtattgtttaaatatgatagaaggtgtgttgtttttccaccaggtgcagctgctaaatctagcactttcattccttcttgtggttcagcaatctgagccactatctgagcagcaggttcttgagaataaacaaggccagttgtgtgttctattgattttcctgatattttcccataatgcccccaaggggtacttgggatggcatttggaaaatcaagttgcttttctttgagaggattggtgcgatatgccgatatgggtttttgttcaaaactgtcaaaaaaagcttctgcttcatctttaagtatagtctgatatttttcaataaattcattcggtaatttcatgtttctattatactacataatcacgggcgtgcaaaaaaaccttctatttaattagaaggttttaagtttattttttggtaaggtaggattggataagatttaatttcgactttggtaggaacattactttttgtcttgttgaatagttgggttcttccccgtcaagcgttaataaggtaaatcctaatgtctcccccatgatttttgctgcagcataatcccaaggttgaatatacgaaaaataagctaataatttgccctgcatgacttttgccatgctaattccagcaccaccatagatacgaacacctaaggtttcagaagctaaatgggcaataccgcaatcattttctgcatacatagcagaatttactccaagtaagcaacgttctaaaggacactcttgaaaaggaacaatttttttatcgttagcatagacatcaaaatgtcctcccccgctgtaaagaatatcagccataacgtcgtagatgataccaaattgtccaacgccttcttcgtaataagctaacataacagcaaagttatctttttgaacaataaaattaacagttccatcaatagggtctaaaacccaaacattaccttgtgcaatgggtgagcgcacatcatcttcttcggcaagtatattatcatctgggtaatgttgaataatttcttgaattaataatttttgtgtttttttatcaagacttgtcactaaatcatcaaatcgagacttttcctcaacatcaaaagtattttgcatctcagatttaatgaattgaccagctttatacactaattgtttagcgaaatcaaatttagcgtccaagtgaaataaatcctttcgcttgttgttgtgctgctttaacagcttgataagtggaataaccgctagttctctggaattcacggtcaatttgtttttcctgcgccttggatttaacaacttttttaaattctttatagctatctagcaaatcatcaactttaatactattttcataggcgtgttcaacttgatttaaaaagcgaagtaccttagtaatatcttccgtattccatgaaggatcaagaggataactataattactactaatcatgttttccctcaatttcagcacgaatagtggcctgtttcagttcttgtttacgatagtcacgcggtaagaaggcacgaatttcatcctcattaaaaccaatctgcatacgttttttgtctaaaataattgggcgtcgtaaaagacttggattttctgaaattaattccattaatgaagacgttgataattcgtctacatcaatagcaagtttttgaaagacttttgaacgtgtggaaataatgtcttctgtaccattttctgtaaacgatagaatttgtaatagttcttctttattgagtggacttgtaataatgttatgctcttcaaaagcaacctcatgcttacttagccaagcacgcgcttttcgacaactagtacagctgggtgataaaaataaggtaatcatataaccgcctcttgtatttactagagactattatacaaaaaattaaagagtttgactatcttttttccaatttaaagcaatttctttatcttttttaagttgttttacaagatcgtcaataccattaaactttaccatttctctgattctttttaaccagaaaatttcaatagtttctccataaatgtcgccatcaaaatcaaagatattagcttctaaacgaagttctgtaccaccaaaagtgatattttttccaatgctcgtcattgctctataatattttccattaatcagaacattggaaatataaacaccgtctgcaggtaagtaagtgcgattaataggagctagattagcagttgggaaccctatagttcgtcctctagcatctccatgtactaccatgccacaggttgaaaactcataacccaaaagttggttagctttctcaacattaccctctgtaatcaattgacgaatacgtgtagaagagattttttcaccaccttcagaaatttcatcaataatatagactggtcccttgaaattacgcgctagataatcaccactggtacgattatgaccgaacttataatcaaaaccgacaacagcagcttttgctctgagaccataaatatatttcttaataaaaaggtcagaagatacttttgaaaaatgactggtaaaattcattaaatataactcatcgacgccatactcttgaaatttttcagaacgtttttctggagaggtaagatgtagcaataattcaggttggaagcgagcgaaggttagacgaggtgtctcattaaacgttaagacgacaattttcaaatttttttcggtcgcgatttttttagctttatcaaagagggctttatgtcccagatgtaagccatcaaaatagcccaaaactaagacgcaatcttctttagcttgaatatctttataatcattaatgtaatggattttcatgattgactttctttataacaatactttgtgtggtttaaattcattgccacgtttttctagtatagcgataactctattttcataaaaagctgctaaggtatctgcttcattttctaataagatacgacgtccgtatgagatttcaactttatcttcctcagttaggttaacttttgggagatctaaaacaccatattcaattggaagtaaaaatgaaaaatcttcttgcttatatttttcattaatttcttcaagcgttaatgattgtgtaatagataatcctgcagatgaggttctttttaggaaagacatatggctagcatatcctagttttattcctagatcaacagctaacgtcctaacataggtacctttactgcatgagacatagaaactaaaacggcagatgcctttttcgaagtacaatgggcttgtgcgtctaaattcagaaattgttatttgtcgtttaggtcgctctacttcttctcctgaacgagcatattcatagagttttttaccatttactttaactgctgaatacataggaggaacttgtgtaattggaccggtaaaacttttcatcgcatgatccacaacatcctcgctaagatcggattgagttagtggagttcttgaaatgacctctccactagaatcttctgtacttgtggcatatcctaaagtgatttctccttcataaattttgccactttctgtcatatattcaataacacgagtggcttttccaaccgcaattggtaaaaccccaacaacatctggatcaagagttccgccgtgtcctattttttttgtatgtaatatctttcgaagcttgaatacagcatcgtgtgatgtcattccagcttctttctttaaattaattattcctgtaatcatgttttatattatatcagtaaataagcggtaacacaaagaaaggagcgtaaaaacttacgctcttttggtatagtgctataaggatttatacctaatctaaatagtatgaaaagcctgtactaaccttcttgaaccctaggttttcataaaaatgataagcttcctgacgatattcttttaaactgctatttaaagccagtacttcacttccatctgttttagctagctgtttaacgtgattaataagttgactagcgatgcctttacgacggtgcttttcattaactactagtgctaaaatacgatagtaagtcccacttttttcaaaaaagtaaagtttatgatatccaacgaaggcgaggagtttgccattatcctcagctatcaaaaagccataatctgaatgagtaagaataacctttaaaatagattgaatctctgataatgatattgcgtatcctaattcttgatacaaagggactaatttttcactatcgtctagtgtagcagttctaatcttcataatcataacctcttagtcttttagagcatcgaattttgctttcattgttggattttttcttgttaatttcttgacagaaacatcgtctaatttattatttgcaagacgtagttgattttcagacgttgttaaagcagccttaacagcttccatacgtttaatagatttatctatttcatcgattgctttctggaaatttttgcttgcagaattataatttttagcaaatgcatttttgaaaatatctaaatcttcttcaaaatgtgtgatgtcaatattttgttctttcatcaaagcaagctcttgtttatattttaaggtattgagtgctgcatttcttagaataccaattaattggataaaaaattgtggacgtataacgtacattttagggtatttgtgactaacatcaacaattccagtattataatagtcattgtctgcttcaagcatagttactaaaactgcgtattcgcaagatttttcacgacgatctttatctaattctttgaaaaaatcttcatttttatgcttcttgatagtatcatcagactcatttttcatttcaaacatgatacttaaaaactcaaggtcattttcatccttttctcgatagataaagtccccctttgagccacgacttgataatgtattgtccttctcaaaataagcattaggaaaggccaaatgtcgcactttattaaattctgtttcagcataatgttctaaactttctcctactgctttagtagactgttgagctttgaagtttttatagaattctacttgttcattggctgcctttagttgtacttcataatcactttttactgaagctaaagctaaatctttttctttttcttgaatgtgcaactgattttgtattgcatctctttctcgttcgacttttgttagcgcctcttgcaagctattttcatgctctaaacgtagtctatcgatttggttttcaaggtcgcgaagcatcatgtctttttgatttaattgctcagcgagttggtactcattgtctttgagaagattgtctttttctataagaaattgtttgactttgtactgaagtttagctatctccttgtctttttctacaacaacttcctgtaattgattttttgcttgctcccctaatattagacgttctttttccaaccgttcacttacttctttgtcaaaagcatctccgcgaatttgttctagtaattgatggtattcagactcgttgatggcaaaagctgttccacaatgagggcatttgatttcgttcatgataactcttcctatgatgttttgtatttggttctagctaagttgttgtctgatgtcattttggatacgttcccactcctgctctgcacgtgctatcttacgtttgtaatcgttgagcccctgtttataacgttggataagataatcctgtctaaaaagcgggatacttggtattgcaatatttaacagttcctttgtgctaatattcatcacagcttttcctttgttagcattctcaagtgcctgttgaccttcttctgaatcaaaaaaaagctttaagtagtaccctctaatgtgttgtgtaggccttagtattgtaatattagcagaggcaacgacagggtaatcttgctcttcaaaaatagcaactttcttgacagttccttttgaagcgattaaaacatcgccttcctgaagtagatattttaaaagcgatcgttgttcatcttggaatgttcttaagttatggtagtcaattcctaaaggagacatatcactcaaattaataatacggatatcacctgcttctgcttttgaaggcacagctttacctttaaagcagtctaccaattcagataataaataagtttttttctctgggttacttgttggattttgtggcacaatagactcctttcgtctttaaaatattatatcacaaaacatagttttttaatactaaaataaaaaataagctttcagtaagagaagcttatttagattaaatctattagtcgtaaggaaaattcgatttttgataaagccaataacatgctacgataagaacaatactggtaatcatgcttccttccacaccaaattttccaccgctaatccagtcagcaccataggttttaacatggactagggagttagacaacattggctctccactaacttcgattccaaagacactcccttgtacacagttccaggcgccatgaataccacacgccccccagatgttaccttttaaaataacatagagcgatagaaatagtccaaagagacacagattgaaaatcgagataaggcttacatgattattagcgctatgcagaagaccgaaaaagattgaactgatactgacagaaactatcttactatactttgtggcactcaccggaagtaaccatccacgacacaatatttcaacagatgcgctttgtacctgccatccaacagcaaaaataagaaaccaaatcaatttatcagctgtaaaacgaacagtttcgataactccagagcctgaaattattgttaatattaagcaggctccaaagagaacgctcccgactaaccatcctctagataattctgttagggctccttctttaaatagccctagagaactaattggacgcttctctttaaatttcacccacataaataacattaccgtactaattgaagttgctagtaaaatgattaactggacgatatcgctatcccactctagtttccaaaaatcaagcgagataatcaattcaataataatataggtaaggaaatctgctgtaaatagtaatatcaaagccaataatatagttaaaaggacatgccttgatactttaccttttgcagtttcctcaaaaatagactctctcataaatatctcacttttatctaactttatactgttatattatacaattaagattacttgctgtcaatcgttatcgaaaagattagaaaagataatctttattataaactaatctactgatttcaaggcatctaacatattgagtttttttaattgatggttaactataaaacctagacttattagaatgatgactactacgcttattggtattataaatgtagttggtgatactttttcaccaaaaagtatttgatctgaaccaattagcaacatcatttgacggtgtaaataagtaccgctaatggtgcctagaatcacaccgatggttgataaaataatggtttcgcggtaaatgtataaagttacttcttcattataaaaacctaatacctttatagttgatagctcccgcttacgttctgctaaattaatattagtgagattatagagaattacaatggctaacaataaagatacgacaactaaaatagtcatagagccatctaaagaacgcacaacggcttctacactagccagctgaagagcattttgcgtaagagactcaactccattaatttctaaaagtttttctgctaagttatttgcgattttatgtttggttaacttaaccaaaaaagcgttatctttagcttctttcttaaaaatagttcgatagtattgttttgtcataaaaatatagtgaccaacattcgcattgacaactcctgttatttttaattttctagaaggaagtgtttgtgaatgagataaatggataaaatcaccggtattaacatgataaaattgagctaattttttagaaataataatccctttattattcaagtgcaatgacttattagttgttgcttcttgtaaataaataaaaggtagtaattgttttttgtctgttatgaatagggaaattgactgtttattaatttgtccaggaatggattcgtcaagattttcaaggtgtattggttggtatttgtctatttttgaatcttttgaaagtagttcaagtatttttgggggagaagcatttgtgttatatgttagcaatatatcatagggcataatacgaccgaaatgttcattgacggtttgctttaaggaggattgtattcctagacctgaaaataagagcgctactgatccagcaactccaaatatggtcataatcatcctttgtttgtaacgaaaaatatttctagcagttactttttgtgtgaaggacagttttttccaaatccaattgatatactctaaagctattttagatcctttagctggtggttttggtaataataaaaatgctgctttttctttcaactcacgtcgagtgataacaaaaactggaagaacaatgcttaataatgaaaaaacaaaggctagtaaactgtaatttaagaaaagatgatactgtgtgtttggaatagtcaggtctttggaaatgatatcagaaataatacgaggtaaaagataatgccctccaatgatacccaaagtagtccctaatgttcctgctataaaaccataaataataaatttaaagataacttggcggtcactatagcctagtgcttttaatatgcctgcgttggttctttcttcctcgacgaacctagtcattgttgttaaggttactaatgctgcgactaaatataaaataatggggaaaagattactgattttagaagtgctatttgtactggagtcaaaagtgttatatccttgtcctccaggaaaggtagtacggttgtagacaataatttgaggcgattccattatttgggtgttatgtctcaattttagaagctcttttgttcgtttcaaaagagatagtcggtcttgtttaattttcatttgaatagcttgtctttgagatagtggcatcgctaggctatcattatctaaccgattgatttgtttttgagcttttagtaggcttttttcctcctcatcgattttacgtaggctctctttttttgttttggtatatcttattttattgtgaatatttaattttcgcgataccttttcttggtatttcgctactttttctttgtaacttattgagaaagggttaatcaacctaagatctttaaaagttacccttgccattgtatatactggagagtgaaatgctgtcttatctaatacgccataactatctaagtcgccgtcccctgtttgagaactaccaaggtttgtcttagaccaaatctcggtagaattaacaaaacctacaatagttagaggacctgtatttgaaaacagtttgtttttatcttgtttaaaattaattttatcacctattgcatatttttttcgttcctgaaatgagagagcaatttctgatttatttaaagggagacgtcccttaacaagatcaaaggttgatatcgttttggtattggaatacaatcgataagatttactattctgttgaggggttgtatctacaaagtaagaaaattcaacttgtgatccttttaagctttctaaaacagtttgatcatgtttgtcaagtccccaagaattgaaaacggtaatatccataacatgatgatgagcaaggtaattttgtgctgttctttgcatattaggtgctgagaccttcagtcctataaaagcaaatgagcctaacatcataagtaagaggattgatgaaaatctaccttttgaagtcgtaattgatcgatagatatctttccaaaatgtctttcccatctgtataacctctaatattctatgttctgaatatcacttggattctcgtttattacaatatcactgatttttgaatcatgcatatggatcacgcgatttgcaattggcgctaaggcagtattatgagtaacaatgatcacagttgtttcttttgattgcgccatcttttgcaggatggctagtacttgttttccagtttggtaatctaaagcaccagtaggttcatcacaaagtaacagtttaggttttttggcaatagctcgtgctattgcaacgcgttgctgttcgccaccggaaagctgtgctggaaaatgattgatacggtgtcccaaacctacgttttctaatgcctgttgggcatctaatgcctttggaacaatttctgaagccaattctacattctctagtgctgttagattagggactaagttatagaattgaaaaacaaacccgacatcatatctacggtaacgagtcaattccctgatggtataattagcaatattcttaccatcaattaaaacttcaccttcactattactatccatccctcctagtatattgagaacagtagatttgccagcgccggatgcaccaagaataaccaccaactcacctctttcaatactgaaactaatatcattgttagcaacaatttcggtttcacctgtttgataacgcttataggaatgcttcatttcaatataggacataacggcacctcacactatgaatacacctatattatagcacttttttattaattctcccataaaaataaatacataaattaagttatgtaaaataataatttttttaaaaatctgagctaaacactcagattccactttatttaattttctcttcttggtagtcgcatttttcatttgagcaaacaacttgtttaccaccaccgcgtacttttttctccactaagaaatcatttgatttggggcaagttcgtccaataggtttgtcccaagatgtaaactcacattctgggtagcggtcacagccataaaagatacgattgcgttttgtttttcgctcaataacttgtcctttttgacagataggacaaataacacctatttccttagtgatagcttttgtgttatgacattcagggaaattgctacacgcataaaactttccataacgtcctagttttattaccattggtgatccacatagctcgcaatcaaatccagcaggttcatcctttatttgaattttctccatttcagtttctgcttttgcaagttctttttcaaatggtttataaaattcatcgataatcttttgccactgctctttaccaatctcaacttcgtctagtttcccttccatttcggcagtgaaggtaacatcaacaatatctgggaaaaattctacaataaggctattaacaatttcaccaagttcagttggttcgaagcgtttagctgcaagcttaacataataacgtttttgaatagtctcaagcgttggggcataagttgaaggacgacctacaccgttttcttcaagtgttttaatgagacttgcttctgaaaaccttgcaggaggttgagtgaagtgttgttcaggattcgtattaacctttttaacactttctccttcctccatatctggtaacattttatttttgtcagtatcgttataaacagccatgtaaccatcaaacttgacttggctaccattagcaataaaagtaacaccattttgcgttaaattaactttcattgtgtcaaagactgctgctgtcatttggcttgcaataaaacggttccagataagagtgtaaagttttagttgatctttgtctaaatacttagcaatactttcgggtgtatgattaacactagatgggcgaatagcttcgtgagcgtcttgtgctccagaagcatttttaactttattcccatgtttagaataatttgcaccaaaacggttagtaataaattctgttgcttcattttgtgctaacggactaatacgtgtagaatcagtacgcatataggtaatcagaccttgatgacctgctgtgcctaagctaagtccttcgtacagctgttgcgcaatcatcatggttttacgagttcgaaaattgattttattagctgcatcttgttgcaatgaagaagttgtatacggtaatggtgcattacgacgacgctcttttttttcaactttttcaactaagaattcatcagttttaatacgttttagaactgttttgacgtcttcattattcgataatttgaatttctttccgtctaaaccgtagaaagtggcattgaatttacgtgttccttttttaaaggaaccgtcaatagtccaatactcctccggttggaaagccttaatctcattttcacgatcaatgattagtttaagagcaactgattgtacacgtccagctgataggcctttttttacttttttccataaaataggtgagatagaataaccaacaatgcgatctaaaacacgtcgtgcttgctgagcatcaacgagatccatgttaatctgacgaggttccacaaaagcatttttaacagcatcttttgtgatttcattgaaaacaacacggtttctgtcttctttgtctaaatctaaaatatgcgctaaatgccaggaaatagcttctccttcacggtccgggtcactcgcgaggtaaacttttttagcctttttagcttctttttttaaatcattaatgagaggtcctttaccacgaatattaatatattgtggttcgtaattattctcaaaatcaatggacatacttgacttttttaaatcacggatatgacctactgaggctacaactttatagttacgtcctaagtatttttcgatagtctttgcttttgcaggagactccacaataactagattttttttagcagtagctgatttttttttacttgtttttttggtcgacgtttttgtcgtagttgccataggtatcactttctatatcgtaaacttatagcataataactcacttttcttaaactgtcaatagaaaacttctcctatagtagaaagcaaaacactactgatattcagaaaggatatcttttcctgaaataatgcatttagctccttcttggataagatggtggcatccatctgatttgccatcgataatatttccgggaatggcaaaaacttctcgtccctcttctaatgctctttcacaggtaattaaacttccagatctcatcttagcttcggcaaccacaataccttgacacagccctgcaataatacggttacgttcggggaaatgaaatttcaagggttgttctccggtaaaatattctgataatacgagatgattatatgacatatattcttgaagtttcttattctccgttggataataaacatctaaaccactcccgataacagctatactactgccgccattttttaaagcactaacatgtgctgctgtatcaatgccacgcgctaaaccacttacgataacaaattgattgttagtctccttgataatctttttaacagactgacaacctatctgagatgcctgtcttgcccccactacagctaatttaggtttagatagaagttcaatattaccctgataaaaaagtagaactggtggattatatatttcttttaactctaaaggatagttagaatccaaaatcgatagaactggaaattttttgaattcttgtcgaagttttttaaggtctagctgtttataattttctataaagaaagtaggatttttacattttgatactacggccatattgcgaacagatagagaagttaaactattctttttgagatagttgataatattgtggatattaagatttgttaatccagcttttttaagcttaaatagttcaaaatgattcataaggttacctccattgactatattcgaaaataatagacaaaataaagtgataagatcaatctatactctgaagcattgataatagctattttttcaaaaaaataagactaggatttttcctagcctttgacaaaaaattaacgattatcaacaaagttctgtacatctttaatcatacggagtgttactcggcttccgcctgaattgatataccaatcttttccatctacctcatgaacacgtttgtttttgacagcatcagttgctttaataacatcgttattaaaaagttcttttgatgaagctccttgtccaatagtcgctccacgatctaaaacaaagagatagttaggatttttttcagcgatgtattcataagatacgggagtaccatgtgaacttagtttttcattttcattgactgctttaaatccacctacagagaaaatccaaccaaaacgaccagaaggtgattgagttaaaagttcaccgctgtttgccattacaaatagagctgtaggtttaccttttttctcaatagttttctgcaatttaagaacagcttgtgcgatatctttattaaaggtttttgcctttttattttggtcgaagattttccctaacattgtgacacgctcagcaactcctttgtcaaatactttttttgagtcgactccagcatatactaatgctgctttaggtgcagcctcctttaatttttcaatattatcaacagaagccatacgtgctcctaggaaaaccacatcaggttgcatacgagcaatagcttcaaagtttggttcgaagagacttcctacgtcttggtatctcttagctttataaacagatttgacgttattgggcaataaacttagagcatttttagccttcgggataccaataacagatttttcagctcctaaagctgtgatagtatccaaagctcccatatcaaaaacaactacttttttgggttttaaaggaactttaagtgtctcgctgatttgctttttattatccggcttgtctcttttttcttttttaatatagaccgaatagttgttttttatggtaacagtttgtgatttttctttagctaaaacagcttgagaagtggttaagatagtgcatagtgctaatatagcaataataagtttttttgtcattaaataaaatctcctaaaatagataaaaactaaaaatgttatcctacataaatctctttatttacgttgtacaaaaaaggataattggtttaccatcaacagtttcgatacggataggcatatcaaataaatgagaaaggattttttcttgcataacatcttcgacagtcccacaagtcaccacttgtccttcttttaaagcgacaacattgtcagcgtagtgagttgcaaaattgatgtcgtgaataataatcactatagttttattaaactcatacgcatatcgtttgataagatccatcatttgaacagcatatttcatatctaaattgttgagtggctcatctaagcaaatatattgagtatcttgtgccattgtcattgcgataaaagctctttgaatttgacctccgctgaggttattaatgaactcgtcagctatatcgtttaaatccatataagatataactgattctatgacagctttatctttttgacttaaccgtcctttactataaggaaatctaccgaatcctatcaagtctctcacctttatcttgagtgttaagtgattagattgtcttaatatggctaatgttttggctaagtcatttgaactgtagtgggctaatggtactttatcaaggaaaatttcaccattatcataaggttcaagtcgactgatacaactcagcaatgtactctttccagatccatttggacctaaaatagctgttacttttcctttaggaatcgaaatattaatgtcttttaatatttccttttggccatagaacttatgtaaattgtttatttgaatcataagtttttccttcctttgattaaggtgaatataaaataacttcccccgataaggttgaggagaacacttagttgaacagtgaggtgtaatagattttgaacgagatgctgccctaagacaagtgtaaagatacagataacaatggctataggaactaatatttgatgtctaaaggtatgaaaactgtgataggtaatatgtgctacaagtaagcctaaaaaagtaatcggcccaactaatgctgttgctatagctaccatcaatgctaaccataaaaaaaatctagtagtaagcttttgatatgagatgccgagtgatatcgcattttctttacccaatagtaagacatccaattcctttataaaaggccaattaatgacaaagctaacgacaatgataatgaaagaaatccaaaggatcttggtgttaatagcattgaaactagcaaagagctgattttgtaaaatcataaaatcgttggggtccataatggcttgaataaaggatgagatagaagaaaataatgtattaaatatgagtccagctaatagaacaaaatacaaagactgttttttatttcgaaaaagtatcgtaaataataagtaagcaaatccaaccattaataataatgaaaggaggaagctactaaaagatgaaaattttatgacacgctgagctccgattaaatacattaatcctgtttggataaggatatataagctatctaaaccaataatggacggagttaaaagtcggttattggttagagtttgaaaaataagactagaactaccaatgcagataccaaccaaaattaatgcaatcagtttttgataacgtgtttttaggatatagataatcaaaaattcatttgcgtcagttggaataccataaattaaaaacaaaataatagcagcaattagtagtatcagtaaaataagtaattttggtatctctaaatccttaatcatgattttccctcatttcttataattgaaatcaggaaaaaggcactacctaatactcctagcgtaactcctattgagacttcataaggaaaaataactaagcgaccaaaaagatcacatatcatgacgatacaagcccctaaaagcgatgtctctaagatagttgaggacatatgatctcctttagttatgctaattagattaggtacgattaaacctaagaaaggtaaagctcctacgataataatgactagggatgtcataattgaaaccaaaactaaaccaaagtaaatcatcttttcataagcaacccctaaattcttagcgaagctttctccaagcccaacaatggtaaactgatgagcaaaaaaatatactaaaaacaaacatggcaatgctaagtaaagaatttcgtagcgatggctagtcatgatggaaaaattaccttgaagccaactgttgacagattgtagtacttgaaaatgtgttcctaaaaatactgttgctgctgctacaatttgtccaagcatcagtccgataagaggtataaaaatattatccttaaaagtaatcatttttaaaatggttacaaaaagaagcgatcctaaaatggcaaaacctgaagctatacatagttgaataaaaatagaggtatttttaaagaaaatcagcgtaacaactactcctaatttcgcccaatccatagtccctgaagttgtcggtgaaacgaacttgttttgggttagttgttgcatcagcaggccacagactgacaaacttgcaccagatattaggatactaatggttcttggtaagcgactcgttaaaaaaatatctacctgtgattgatcaaggtgtgttatttgctccagtgggatagatttcacaccaacaaatagggacgttagagaaagtataaccaaagtacaacccattacaggagtggttaatagctttttcataaaactccttaaaatgaaagataaagtgttcaaaaatgagcacaaaactataataacataattttttggaaaaatatctactttttaaagaattttatacttaagaaaacattattatatcaaggtttttctatttaaaatcattataaataagatagattaaattagcagaatatttactttacctatttttgaaattagaaaaaaaccttcgttataattaaaggtttttctaattttaagctaattttttgattatcttagcagggtttcctgctataacaacgttattttcaaatgatttcgtaacgacacttccagcgccaacgacgacattatctcctaatacaacacctggtaaaatagtcactcctccacctagccagacattattcccgatttggattggggcaccgtattctaatcctgaatttctttctattggatctagaggatggagtggggtgaggagttgacagtttgggccaaacatacagttatcgccaatacgaatttcacaaacatctaagaaagtttggttaaaattggcgtagaagttttcaccaacataaatattacaaccataatcgcagacaaaacgttgttccatatggatactcttcccagtagcaccaaaccatttttgtaaaatgacgttacgtttgctactattatcttcattgttaaaggcttgcatattttttagtgcaacttctctatccttgcgtagttcaggtgctgatggacgataatattgtcctgctaacattttttctttttcggtcatcttttcctcttccgtattatttacaacattgattttataggttcaaaacttttacgatgtatcggagtaataccgtatttttgcaaaccttctaaatgctctttagtaccatagccagcatttttagaaaatgcatatccaggatatgtgctatcataatcagacattattttatctctggtcactttagctacgattgaagctgctgcaatagagagtgaattagcatcacctttgataattttagtttgtggaattgatagatctaaaaccatagcatcaattaaaagatgttcaggagccacagataaatgagaaactgcatcaatcatagcatgttttgtagcttcataaatgttgatatcatcaatacattggctgtcttgaataccaataccaactgctaacgcttgatctaaaatattttgatagatttcttgatgctttttctttggaatttttttggagtcattgagatgttttattttacagtttggtggaagaataacagcagcagctactactggtcccgctaaaggacctctacctacttcatcgattcctgcaataaggtttatatgttcaatgtaaagttttttttcgtagaccaacatttgttctaagcgcgcttcttcgtctaaatctgactgaatatttttttttcgttgaaggattgctttttgaacacctgcgcgtgaatctgtttgatattcttgccaacgtttgtcttttaaatcaacaatagtctctaaaattgctttgatttctttaattgttgccatcatgttctccgacgatatctaacgtatagcgtcctaatttaccatcgcgaacttctttgacaaataaattataaaagcgatcgtaatcgtcacgataacctaatttttgtgttaaggccatgatgatttcaggagcttcatcctctaaattaatgcttttaaaacgctctttgagacgatcaggataataggttttaaagtaattcaatccaaatattgttacctcatccataggcaataattgatctttgattgcccctgttaatgctagctttaatccaactaattcatcttcaaatttgggccacaagataccaggagtgtccaaaatttccagttccttattagatttgagccattgctgaccttttgtgacacctggtttattaccaaccactgcaatttttttacctgctaggcgattcattagagtcgatttacctgcattcggaattccaataatcatcgtacgaagtgtctctttttgaataccacgtccccgtagattagcaattttatcggacattaatattttagcgatgtcggttacttttttaactgttgattgttctttagaattaatagctaatgtctttaaaccttgagattcataaaaatctctccattctttagttcgaataggatctgctagatcagctttattgaggatcattagtttgggtttgtctccgacgattttggttagcattggattttgactagaaagaggtaaccttgcatccactaaaattgtaacaaaatcaacatgcttaatattttcttgaacttgacggcgagctttggacatgtgtcctgggaaccattgaatagtagccatgaaataaattctccttatgtatagactaccttaaaagtctacatctatttgttagaggtctaattttttagttttattctttttcaaccgcatataaaggtcgataaaatattcgattaacactattattctatcatttttttaatgatatcgaaatactttatacatttattccgctgataggtttcgtttactaattgagtttaagggatatacgaaaaagctctggaagtttactccgagcttttaataacatgatttttaccacattaagactatttgatggtaacagtcgttccttgaggaatattttcatagaaccattttgcatccgcccttgacatacgcacacagccatgtgaggcggcttttcctaattgctttgcttcttctggaatctcatttccttgttgatcagtcggaacgctatgaaagagataaataccatgttctttaaaggagacccaataataggctccttcttttgatgaggcgttatagaaaaaatctcctcgttccggttctatgacaaaagttccttttggggtagggctctcttttgctcctgttgaaacaatcgttttaaagatgaccttgtcattcgaggttattgtcattgtttgcctcgtagatgaaacatgaatttctagatttgaatatttatttagatttggataagtcttcttttgtaagacctctttttttgaagtttgacttgtttgagatgcttgttttatgacacttgctttttctttggctttatcaccacgaaaaatagaatatacgctaaagatactcatgaaaacaaataagacagctaatattggcaaaattgaacgttttctcatgtactatcctctctcttttgctctgttatggacaaatctattataagtttctgaaagaaggttgtcaaatatttttgtaacatttgtaatcaaacagaaatatttactggaatttttagtagaaaaataacctcgaatgatacttcattcgaggttattgtgataactgtaagtcttaataacatggcttcaaaataatattaagaatctaaactactgtaataattaattggtctatgatcgttaaacaggaatgcttcaggatgaacagtttttaattgtttttgaccagatttccagaaaagtccaacaagaatacctgttaacactaaagcaagtgaataagttaagatgcctaagcccatattaaatccaattggttgagataaaatataaacaactactgcatacaacatgaacatagctggtacaaatgttacccaataatttcgtctttttaggatgagatatcttgtagcaactaataaaccaataacagcagttacttgatttgcccagttaaagtaacgccataggagattaaaatcaacgtgtgtaaggacaaatgaaataacatataatgggatagttacagcaaagatttttggaagagtatcttgtttgacatggatataatcagcaacgatagtacgtaagctacggaaagctgataaaccagatgaaacagggagaacaataacaccaatgatagcgatagttccaattacactaccgagtaacattaacattacttgattgacaactgcagaaggtgtcccagcagcaatcatttcatagagattttgacctttgaacaagctcattgaagcacctgcccaaatcatcgcaattactccttctgcaatcatcatgccgtagaaagtgaaacgcccttctctctcattaacagttgttcttgagaccataggtgcttgggtagcatggaaaccagagatggctccacatgaaatggtaaagaataaagcagggaatatcccaagcccagctggatgcatatttttaaaggtttcaaaagttaagtttggcatatcaaagccaccagttaataaacggaagccaactgctgccgtactaaccattaagatgacgcagaatacaggataaactttaccaagtgctttatcaataggtaagactgtagaaataaggtaataaacgaaaataagaccgattatccaaggtaaagatagtgtcccagctggtaaaatacttaggataagattagctggagttaccacaaatacggttgcaactaaaataagtaatagcattgaaaaaatgttgatcacatgcttcattgactttccaagatagcgactagctaattcaggaagatatgcaccattatttctaagagaaatcattccaatcatataatcatgaacagcccctgcaaaaatacatcctaagactatccagatataagcaactggaccatagagtgctcctaaaatagggccaaagataggtccggttcctgcgatgttcaataactcaatcatcccattcttccattttggcataggaacaaaatcatatccatcccttaatgcttctgcaggtgtttggcgattttcatcaatttgaaaattcttttcaatgtatctaccgtacgtgaaataaccaacaattaaaagggctacccctcctaaaaatgttaccatatcactgcctcctaaaaatttttttgcttaattttattaagcgttttcatgactttagtatagcattgaaaaattgaaatttcctattttcaagatgaatggttgttttttagaaatgaatagtctaagttttatgatgaataacttttcattagttaggtagatatgcctaacatttgttttaggggttttacatttgctctgctaacaggaactgttattttattacaaaggtgtaactgaagtgtttggttaaaccaaggttcaatcgttttaatagcattaatgttcacaatgtaagagcgatgtacccgtacaaattgagatgatggtagtttatcttgccattgttgtagagagccatcaatttcataatttttatcaggtgtttgtataatcagttttccttgcatagcttcaatcaaaaggatatcatccgccgacaccagatagattcgatcttctactgtcaatggatactgttgcttgaagagaggaccggaagttacgctctctataattgtagatgtacttagcgctccttttactctatccatagcttgctttagcctatcaaaatcatagggttttaacaaataatcacgcgcatcatgctcaaaagcctgaatagcatattgatcataagcagtcgcaaatatcaataatggtggtttgggcattttattgatatactctgctaattgcaacccagaatcatctctgagatggatatctaacagtgctacatcaaaagtttctctaagtaaaatagctaatgcagtagccatatcatgcgcctctgctataacgaggttagaatcatacttattaagaaggtaaattaattcgttacgtgcaactggttcatcatcaactactaaaactttcatacaatacctttctaatttttaatggggatattaacaatagcacaagttcctgaatcatttgattcaaattttaaacttgcttgtccatcataaataatattcaagcgacgaacgagattctcaatagctgtaccagaaccttgttttgaaatttgagttttttttccaagcgttattaatttttcttttggaatcccaataccattgtcttggacaatgatatgaagcctatcattatttcttgcaatagtaacctttagctggttatttttattaacatgcttaaaagcgtgtttataagagttttcaatcaagacctgcaatgtaaagggaggaatcattaagttgtcatctgaatttgtttggttgtctaaattaaaggccaccatgttgggaaatcttgcttcttcaagggctaaataggcgttaacctgttccaattcatcatgaagaggaattaaattttgctttgcccgttgaagattagcacgaataaccttgctaaaatcttggacgagctttcttgctttttcgctatccatgcgaattaaaccataaatagtattaagtgcattaaaaagaaaatgcggattaacctgcgcttggagagacttcatttccgcatcctgtagtaaccttgttgcttcctcagcttgtcccaaagctaactgagtggaaaagatattgcctaatccttcagctaattgacggtcaacgtaagtcatatgttgtgcgtctgaaaaatataatttcaaagtacccactataacatcgtggatgtgtaatggaataacaattgctgaactaagtgggcaattcttatggtcgcattcgatttcacttttatcagttgcgacactaactttaccagtatctattgctcttttagcaagctttgttaatatttgagtattaggaagatgatggtcagctccatctcctacataggctaaaatggctgattgactagtcaggctaacagcactcacatccatatgtttatgaataatttcagctactggttgacaagattctgttgtcagtccctttctaaggtaaggaagggttaaatttgctaattcaagtacttgatgggtttgaaatgctttagcatgttcttctaatttttgagtagatgaaataatggatataaatatacctaaacctaaagtattacttaaaatcattggcatgctgataaaagatactaagcgaagcgcctgattaaagtcaacactaaaaatgaggatacagatcatttgtagaatttccataccgaaaccaacaaccattgcatctaaaacacgaattttattataatttttacgaagataattgcctgataatccagagcataaaccaattagtaaggaagaaatgacataaatatgaggggctaatcctccttgcaaatacctaacgaatacagataagagaccaactataataccgactatggggccaccgattagacctgatacaccaatggttaaaacacgtgtattggcaaccgatgattgatctgctatatgattaagagtttgtggaatgatagataaatctgactgaatttctacccctgtaaaattagaaataatagcaaataagctaaataagataagcagaatatactggtgtttttttaattcgggttgcttcaaagtttgttttataaaggggatatgcacaaaggcataggctaataatatgattaaccccgctcgctccatcataattaaaaagagtgtcattaaatctctccaaagtattaattagtccgttataacataggtataaaatgattcatttcattactcatttaaaatgtctctctatcaagtattctcaagacaattaaggggatatccatcaacaactattatgaaaacaactacttaaggataatagatactttcactaaaaaattttgattaatcaaatatattattattatagcatatcaaatattattttttacatatttattaattaatatgtaacacccattatctgaagtgtgtaggtgaggtctaagtaaagaatttaagcgttttgataataaaaaagtgagaacaatagattctcactcacaattagcctggtaatttctcacacgatttggtactgctttttaaaattgggcgatggtgttatttttaatatgagtagctgcactcgaatccgattgctcaaaagcacttgccgctccattgagatagctattcagatcagaaataactggttgaatgttttggctgacttctttgataacttttgatccagcttctaagtattttcaatgttcttgaacccattggtgattttttttactaagtcacatgctgttaaaatcatcattaagcttatccctcccataataataatcaattttttaaatcctttaaacatcacttttcctcttatcttattgattttttcaattttattgctgtcttgacgttgctatcgcaaacaaccaactcaatgcaatatagttatggtatacatatcaatgtaagaatcaagatttttaaattcatattatttgtatgatattcaggattagctatttttgatttcacaaaaaaacttcttctactttttctagactgattctttcttcccactccttcgtatcaatagttaaacaaagtactttaaatcctacagagggtcattccatcaattaatggtatcatcgcgcttgaagcatggcataggttttggtattagaaactgaatatgaattctattatctgttaaaaaaatcaatatcaccagagtatttataaaacataacgataaaaaatcaaaaaatatttttactatttcccttaatttcatgagatttaatttccctttttgtgtattatttctattctacactagtcttacccttagaaatatttttccaattttcaatgacacgagctactctttcttgctcttcgtcatggtacctccaaaaattacttcatcaatatcttcctcattgaaataatatacttgttctaaattgagctctctggaaaaatcctgccagataatcaaaatatcatcttgatcaataatatttgctcatgaaatggctccacaaaatttcttacatctttaacattttcatagagtgcttttactccacaatggccaaagtacctataacaactgctactactggtacaaattggagctgttatgattactacaaaaacactctcagcaagcgtagagactattctacctacttcattttttctagatatttattgctcctaccttaaattaattaatttatcactcatattcgggatgcttatgaatataatatgctgcataaagggaatcgacaatcagagctggaaaagttgccgtaaataatacacctccaatcaaaccaaaaatattttcaatactacctacaagaaagactggagaaagcatcactaaaccaaaaataattccataattaatttttaattgttccttttttcctttttgtaatttccactgattaaatttccattttttcccctgattttttggtaaataatagaaataatatattccagaaaatacaataaaaataattaacattatcataatatacatttttgccatctcagtataataaattgattgaacatgtccaaaatttctattatttaaaaacattgccaagcctataaaatcaaaacctataataagtgttaggaatactaatgataataaaatataagaaattttttttaaaaaattagatatttttttaaaaaaaagcgaaataattattgagaccaaattaacaaaaatgcatacagaaaatatgaattttataaaacctaaaggatcaccaaaattacttgcatataaccctatgcaagatataaatagtccaatccatggaaaaattttaatatatgaatattctatttcaaactcaattaacggtccatgatatctatggttgctctgtttcaaaaattttaccctccaaataaatcttttaatccttttttagcaaaacctgtaattgattcattacccaactccttaactttaaaattcaaagcaaaatcaaatgccagccctgcactgctccaacaacggttcccacaggtcctcctaccaaagttcctattgctgcaccggacaatgcatctacacctgaatctatagcaaagtttttgattttttgatctagtgtagaagtcttatcatcaaaaaagtcttttttggcattagtttctatattgactattttcccagtccaacctaatactttaccagctttagcaattcttcctaattttccccatcctttaaaagcatttttgggatttaattcaaggacttcatttttaagggattttattgctgcattattcaaagtaactccttttgacgcaatttttctgagcttatttgaatcttctaaagcttttttctcaactgtttagcatcttcttctcgttttttcatacctgtttgaattgtttttgtccattctaatcccttacctgaggtatcaaatgtaccatttaaatttccaaaaccttctgagaatagttaaggcctgccgaaacgacatcctgaacttctgttagtccacaaaagactgttgaggattccgcattgaattccatgagatattttttaaatcataggttacctttaatgccagaaaactcctaagagatttcatgaactagctgtcactttataagtgatcacaagctaataacaaaagtgaaatgaatcattaacttttctaaagttaataaagaatggaattagctcaattgccactctagaagcgagaaagtcaccataagaatgacctgttgtgacagtaatattatcgccattactttgaacacgatcataaaagctagtagctttgtctcctaatcgttttaaataagcagagttattagcaccgatatttgcatctgaaataaagtcggttgccccatcagcatccttattagtacccgcataagctatataagtctcaccagtatttttatcttttacagcaatagctgcaataccagtctctttgtcatacataccgtcactataagttaaatcagttctatcaattagttgatttaactcttttttagtactttcacttgcttcttttatgtcatcaccattatttaaagcatctgtataagccctctcatatttgtatacataatctgataaatctgctgatgttttaacccgatgttctagttttatagttacattatcatttcccataacttctccgtttattttctaaaactataggtctcacccaaatagtatctcttgtttttagtttttatccttagtgtatagtcaaaattattttttccactttttgtaaaagtaatatctgcttccttaatatcagatattttaaatttatctctcattttttaataagcttcgactgtgtcggcaattcatatgttatatctttcaactcagtttccggatgttttaataaataactttttacttttaatttttttaattcttttaattctttagtatccattgctccgataataaagtcatcaaatgtaatattcggttttccttttggataaactatattatttttaaaatattcaaatgggacctctttattttctaactcattatagccacccggcttttctatttgactttttcttgtttcaaacttccctaaatccttatttttttttaaatcttgaatactatagaaatattctaaatctaatgcatcacctgaatccgatactaatagtaagtatttttgtattttgctcaaatctttatctttttgtgctaaaaactcaaaaaacggtttaaaattttgttcagcttggtactcttcctttgtgcggttttctgggatttttgaatccttacatgctgtcatcattatcattattaataagcctccaataagcagtaatagtttttgttttttcatatgctcaatgctccatttctatttcttgagtgattttaagcattctttcttgtcttctatcatgaatataaatcatatctggtttcaaataaggttcttttgaattatatgatttcggtaatactgactgatccataactctcattcctaagagaacatactgtgcctgtgttctaatagcttttggaacatctgagatattagtcataaggtatgatgctaaaccaccaaataagaaataaatatgatatttgtgagccgagtcaagtaagaataaaatctgttctctatccatatttgtttctgccacaaaactattcatatcaggaatagtaacaaaccatgattctattttaccagattcttctattaaatagatttctgaaacaatagcttctaaatgccctgctatttcacttcgattattgatatattcaatttgttgttctgtcaaatcatcataatcagaagcagtgtctaaaagataaacttactatctttaatcaatgaaacagatttaactaagaagcgcatcaagttagacaaattatctggattgtcagaagtaaaaagtaactgtttgaatttcgaaagtggaatgctacaattatcaacttcttttaagctaataccaagtgaaatctgattagtctcacttgcttttttaacatcctcatatgctttaaactcctcaaaggtaagtgtttctggaacaattggaatggctattggtctcggtccagtccatttggtgataaaaatctgttgattttaaagttcttatgaaagataaaagggtcttagattttgacaagctaagaaccttttgtttttcaaagaataattatctacttctccccaactacataagtcaattgtgctgcttctgctgcactgaaggtgcggtaggagatggtgccaagtcctaggacatttgattcggagatcgggatagatccgtcttccttaacgtcttcgacgatggccacgtggccgtaagttctatcagcaccagcttggccggggctaaatgagatggcgtagcctgtttttgcctcgtgtgtggtttgatagcccggcttatttttccaatcgccaccattacccataaatggtccaaactggtagccaagttctttggccccaagggtaagtgcctgccacatagttgcccgcttgattagctcttgaaacagagtaactcgttgggactgccatcatagcgacggacgacgtgttgagcagttcctttgaaatctcagaaattccgccatgcgcgtcaatccacttgtcaatgctctccataatggccgcacgacgtttaccagaaccgctagcatccgtgaagtaaaccccacctcgagccgctacattcaagttgccagttgacaagaattgtgctttttggtcttgaatggcaaagctggtgttttggttttggatgatggtttcctgcgtcattttaatgacagccttgtcatcactaaagttttgagcgttagttgtattgttgtcaactgccccaaaaccaaacatattagcacctggtgctgtggcaacgccttgtgtaccaagcgaactttctgcgatagcaatggcaatgattgcacgcgcatccagaccagatgatttctctcggtctaagattttttgaccgtcgatgcgactgctatcgtatgtgatacctgtcgactgtaagaatccatcaagctgtgcggcagtaatgccgtaacggtgagacaatagattgtgtgtataagcatcattgcctatccagtgtttgacataagctgcgctagccattgccgtaggtatggcaacatctggcaaatcaatgccactcgtaatggctggtgtcacaacttcagatttctgaggtgttgctgtcacttgaggttggcttggcaccactggtgttacagactgactaggagctggagtttcgggtttgcttgtatctgtttgcgtcccagcctgtgtttctcctttggaatcacttgttgaaggaactgtttatctggactagtcgtcggattagtttctgtttgtccctcaattacagtctcagtaggagctgttttgctatctgctggttgggcatggagatcagttgaaggcagacttgcctcaggtaccactgtcgtcgcttctgatgaaactgactcagaagcgcttgtcgcctcagctgatgaattttctccagctttttcaattgtttgatcagttacagtcgtagcttgcgtcaaaatagtttgtgcatcctgagcaaaaaccgtaacagccgataagtttgacgtggcaattgcacacaacaaacacaatgcaatatatttatcttttttcaaaacgtttttccttaatagtttatagagtgtttaaagaatttaatattaaaaattacttttcttttattcttcagatgactattttaaaacgtctactgaaaagtgagggtatttgatatcttttatttatttcaaaaatattttttgcatctcctcttcattttcatcatagtaaccttcaaacaagactttatctatatcttccaaattgaaaaaataagtttcatttccaactatactaattgggaaaatacatccagaataatcaaaatatcccaattgaccttcattgtcatataacggaaatcttgatgtaatcatgactttctgactatcattttttaattcaatgacacttcctagagtatgtattttatccattttttcttctatttttacaattaaaaattatattgcttttttatttcatttattgcattttttctttcaaaaaaatcaatattttctaataacaatcttgataatattagtaacataagtgctataggaaaaaatatcaatactgagtatttaaaatataacattattaggagtagggatataaataatgaaattactaataaaaataacagtttattcgacaattcttcagcagaaacaattatatttgctattttttctttgtcaaattccattttctcgtaactaatattatcgatatttctcttttgtttcgaaactatattgtttaatttgttaactactactagtgcaattacgataaacattattgcaagaattaaattcaactttaaattagctattgttctataccaattattaataggaatgagtatgagaacaagaaacgtaataatactagaatattttttaatattttctaaattttctttttgataattaggcgtttcaaaacttttaatgtaaaaaatttttgtatcaaaattataataataaccttgatttccgtcatgatatatttctgcatatgatttctctctatgtatcaaaataaattccttctcaatttatactacctgttgaatcatacattaattcaaaaaaatcactaacattgttaattgtatccttcgatgctctttttataatatgatttatttcatctttattatcataaacataatcgaacaccatcgatccacctacacctattactgctgtagcaccaaagtccacagcagaaccaacaacaggagcaggcggtgcaagtacacctgttgaaattaatagtccagctgttgcggtacccgcagccgttcctacaacttttgcagcactaccaattattacgggtgctcctgtcttcatagttgcatcttctacatcttctccaccttttacttgagctgctccaaagtcaattgcagccccaagtacaggcgctccatattttacaaattggctcgagcctctaatgaagttagcgtaagaaggatttacatcaatagccgagctgtgtcagtcaattttgatttagctacctctttaagtaaggcagccgatgcattacttaaaccactgataattgattcataggtatcttttttaatttctcctaatttatacgcttcattagccgcttttattaatttctttttatcaactgaaacattactttttttagtagtattttcaatttttgaagctttcttactttcttcagcctttttacttttcagttcttcagctttggcgtcttctcgctctttccaattcttcttaactgtctttgtccattccatctgtccggatgttggttttccaaaagctccggttttactattatatccagaaaatcctgttgaaacagccgctagtgcttggttaacagttgactgtgcattagaaatgtccgcaaatactgttgctgaatgggcgttaaattcattaaggttgtctaatttcttttgattagattttatacgtttttttaattttttaatattactttttgtagaacttatggcagatttggaaggttctggatcatcgttaagatgctctaaaagtgcttcagcaatctttaatgatgccctatcacttgctaattttgattctaaaacgacagagtctaaatcctcatcaccacaaattgagacatataaggtttgtaattctgtacatttctcactcaatgtttcagagaaaagaatcattccttgaagcatcggagttaacgttccagtagcatagctttttgcatttgaataagcagtcccttgaagagttgcagcctctgcaaaagatgatagttttgttattgcatcatttaaagccgatacacgactaaacatagaaatagctactgttgatgcttgagttcctacagaacttacactaacttttaccatttttaacctccttttctttcattacttttttgcatcaaactctgtttttcataatacaacttatctaatgcattttcataatccataatctctttagaaactaagtttatcctattgtcataggattcttctaaacttagtgtttcactatttaccgttagaataaagtcattattctcttctaattcttctgattctgttaaataggcatcaccgagttttaatgattctagtaactctatttgtaactccatgacgtcgtttttcaatttttgtaagagccttttactattctcagcattatcaagctttatttggaataactttaagtcaagttcaatatcttcgaatgttcgttcagtcataacatcacctattaaaacaaaccatatttaggcttaaaatccggatttgatataacagagctgtcattactaggcattgtatatttagtatttgccgcaatctcttagctaattttttggtcaatagcttcaaactcattcaccgtagaatgaatgagagctatgaactcatttattttttcagcaatttggctactactacttgcctctccatcgatgtaagttgaagcatcgctattaccactataatcactgtttgaatccttagttggagctcctactgctgtgattccactggctcctgattgtattgcagttgcacaggtggatgcgacggaggcatcactttgtatttttgccatttggtctcctttcttagtctatggtgagttttaatttttgataggtttttctatcgtgaatgtaggcttcgtctttgtttggacggatttccttactattatacactttttcaaggaaggtttgatccatgagcctcatgccagccagcacatactgggtcgttgtgcgaacgtatttaggcacagcatcgatcttagtcccaacatagttatagcttgatccaagaatcagatgtaaaccatagcgtggtccattgtcaagcaatgcctgaacctgttcaagcttcatattgctcttagccacaaagctttcaaaatctggaatcatgataaaccattcagctatctcagattggctttcacgttgctgcaactcatagatcaactgatccgccatatcttcaatcatatcagaacccacataagtacgtacctgaccttgatagctttcatattcgccaagcgaatcgatgatcatgttatggtaatttgggacgttaagcaagaccttgatgatatgggaaccaactgcttcgagtgactcgtcagaatcagacatgtaaagcatatgcttaaagcgattaagtgctaaactataactttcaacgtcaaccatttcaagcccaagtggtaaacgattagctgataggtcagcttgaacactatctgtagccataaagtcgtcaaaggttaattcttcgggaacaattggtattgcttttggtcttggtccagtccatttgctgttcatggcgtcagattcgttttggatgttattgatgatgtcaaaggtttcagtgccttctgttgagagagccacttgtaacacttcaatgtcatcacgtttgattaatccacgtcctggaatatcttccatgatgtgttggtgacgaccgacaagtgtccgtgattcagagtcatctgttaatttaagagcgatacgttctttaaggtttgccattaaggacgacctcaaagctgccgtacgaccagctgagataactaaggaaatgccaagtgacgacccatcacgcgaaatattttggaaacaagcttctaagttagtcggtgtttgagcttcccgtagcccttcataactgtcaataacaatcaggatttgaggcatggtttccccagatacctgacggtaaagttttgctgtcgcgacattgtagcgactgagggcttttttacgatcagacatttcaactttgatacgggcaataaacttggctattttttcgtcatcatcaatggtaaagaaatctgctacatgtggcaaacgtcttagaggtaagaggccattggtaccaaaatcaaagaggtaaaggtttaaaaattctggactattatgacgtgctaagtccattgttacagtttgaagggctgtggatttccccatacttggtcctgcaaaaattgacaaatgcccatcgtcttcaaaatcgtggtaagccacttcttgtgcttgttggcttggtatatccataaagccaagaacagctttgtaagatggggccttgctccagaggtctactgatccctccttacggagatcggttactgcaatctgattgcttagaggcggtagccacggttgaggtaagtctgagatgcccatttctttggttaaagcttgaatgttttcaacgatagcatctaattccgtaggtacttctttaatattttcggcttggtctaagcctgaaagatcatcatttaggatttcgtattggccaaggtcgttgatggaataaatggtatggtcttcaatcccttggtcgtctttttcaggttggtaatctgctcctgaccatgctgattggaagagttcatagacttcattattaccaacttggaggtaggcacgtcctgcttgtgtaatctcggcggcatctggagtatggagcatttccatggagtcgccgcggtctgctactttaagagctagtttgaagcgtgagtttgaccagatttggtcatctaccacaccagatggtttttgggtcgctaggattaagtgaatccctagggaacgcccaattcgcgctgttgagacaagctctttcataaactcaggttggttggatttcaattcggcaaactcatcggagattaagaagagatgaggcattggttctgaaacttctccaagtttgtatttcttctgatactggttaatatgattaacatcagctttagcaaataaacgttgacgacgtttcaattcagcattaatagaaaccaaagcacgcatcgattgggcaccatctaagttggtgatggtgccaagtaagtgtggcaggtccttaaagaggtttgccatccccccacctttgtagtctatgagaaggaaagctacatcgtgtggatggaaattaacagctaaagaaaggatataggactgtataatttctgacttccctgatcccgttgttcctgcaactaatccatgaggaccatgagctttttcatgtaggtttagataaacaatatcatcctgaccacgtaagccaagtggaacagctgagcttttatacggagcatggcttatccaacgctcttgaacatgcaaatcttcaaattcttctgcttgatacatttccataaaagtaactgcttctggtattgaagatttaagattttgtaggtgatttaacggagctaggcgacgtgaaatattttccttgtcataatcctctaagaaatgatctaattcaaaatctgtttctttaagctctccttcttctataactaactgaccagtattacggtctttaatattaataatggttttgatattttctgaaagtgaactcataacatcttgaacaaagatgagagaacatcccaattctgtaggatcttccgtaaagaattccatgatgacgtgatctaaaattaacttttcatcagttacaataacgacataatgcggagaaaataaagtcccttctttggcagatttatcttcgcgttgtgtgcgacgtaattttaaaatttggttaagactgttgagcacttgatcacggcttctttgattataaacaaagccacgaacattgacatcttgtaaggtttcatgtggcaaccaacgcatccaagaccacttatccatctcttcctctggaacaatagtaataaattgaacatcatggtaagaatggaaaaaagctaattgattaaccatcaattggagttgctccaatactaaacctcgtggtcctatatagccaactggtccatgtgataaattcgcaacaatcggcatatttttaatataacgattgttaaagtagaggttatagccttcgttctctaaaggatcttttttcccagaacgttctggttgagaataatgaatattatagctcgttggtacttctcccaaacctaggcgataatacaagaagtcaaaatgaagtggtgtcttttcataaatacgatggtgataagtatcagccatttcctgtaaaccttcaatcgttgggtaatgatagtgttgcccacgcttttgctctttagctaacttctgaagttcaattgacttatcagataaatagtcatgataggaatcaatgcgttcttgtaagtcctgcttatactgtttacgatttttaaagtaaccagtgatagagaaaatcatcgtcactagagccattgacattgttgcaatgatatagataccacgaggacgaaaaatagaaataagaatgctgactccaatcatcactagaggaggaacaattaattttaacagttcatctttagacttattaggttcattaccaggcgcattaactgtaattttatcttcactggaacgataaataatacgaggtgagcggtgaaaatcaggatagccttcgtaaaattgataagctgacataactttcttagttaatgatgtttcataatcagcccccccagatttgaatttcatctgggaaaagcttaacaattgttccttggaagctaatctcatcacctaaacttaaaggtaactgctgcactactttttgaagatgattattcagataaatatcaccttcaaataaattaagctgccaattactttctatttttttcagtaataaattaggggctccttctttaaaacggacacgatacccttctttatcaccgattaatatatcttcgtaatctaagggagtataaatttctttttgattattcgctaaatagaagacaattcctgaaatctctacaccattagttaactctttttctttttagtcaataatatataccaattgaccttgtatattttttagcgtgatgtcattttctaaatctgatactggtattggcgacttgccgtttgatgatattagaaaggatttctcctcttcaatattaaattcgtagcggagtgattgataataacaaataactaacatatccacctacctacttttagttttagaagatgtacttgctgtagtacttgatgattcagatgactctttgttggaatttgtcgaatgattattgctatttttcgatttggattcctcatctgttaaggctgtcttacggtctttccaatatttatcatagtctgtttgtagctcagaaagtttttgttcacgatctttaccagataaactattgtcttttctaacctgatccattttctgaacaatagcataaataacaaggtcagaatcgtctaaacgtttggcagcatcaatagcatcatcatctaaaccacggccaatattaatccaataatcaagatagagctcatcagtcttgagcgtaacattgtttaaaataacttcacgctgttcttcagaaaatgacattccattaatataggaataggccaactcgtacttctgtgtataaggtaacttacttacttttacatgttctagtcgattaatcacttgattataatcaactttaataaatgaagtatccgctgccaacattttttctttgaatggattgtgaataaaaaccagatatactagcggaatcaagagtattgtagataaagctcctagccaaacacttatgtatttataaagcttatattttgcccttgatacttttgctaacgtatgagtttctacttctacttgctgctcataatcaatagtaatgatgtctctaacagcctgaatagtttctgcatgataaatgctttttaggaaatctgatacttcaataacagaaatagcaccattatacaactctatatagtcatgttgcgtcaataatgcaaagacaaaacatttgaattgatataaaaactcttctggaccaaatttctcaggtctcataatcccaggaaggctacgataagctattttagcagttgcattttttgttaaaaatagattagagggatgcaaaatgaaatttactgacaaagacaaagccttatctaaatccaagacattcaaggctaatcgtaatttttcagataaagtttcttttttaaagctttcaaaaaatagagcgtgcgcttctgtctggaattgaaattgaatggtatctgcatcaattgcagttgtcataggcatcaacaaagaatggtgaatttctaacaattgcagttgttgcagattttgagttcctacttttgaacgcttaagagataactgccaaaaatctggtcctttttcaaattgaaagtcttgttcttcaaatacaaacgaatctgtttccattaataaaactcctctatccttatacgatcaccagttgttactggatggtgagctaatatatcgttctctcccaataaaatacctttatttataactcttagttgatatttggtacgcctttcagtacggctaaaaatactatctaattccattactaattgcttaacgctaattttcaaagggatacgtaaatcttttgaggtttcccccatatctagagtaatgttaatatgtgtattcatcctttttgtcctttattttaaaagtcattatagaagctaatattagtaccaaactaatgagaaccaggtatataattatatgaccaatatcagccgaaacagtcggttcttctgttcttgtaacaaatttaaattgattactttcttcagaaaataattgtttgatacgttttttcctatcagattgtcctttatttgaatattgaaacagttgcttagactgctttttctggagtgagactttagattgacggtttttatccaattttttaaggtcttcttttttaaataaatctttagttaattcagtttgaaaaccagaatttttttgtgaatctgattctaaacgttttgtatcaaaatgaatatcattattctttaacccatcagaaaatactgatgtttgactcatacaggataatattagtagacaggctaaaaatcgtttcaacttcatcaacaacctcactcttttactttagcttcaaaatttaaggtgataaaaatattcatgataataaaagcaacatccacaagaagtactaagataaggaaaataaatccagttgtcacattatcaaaataagatgataattgattttcaaggatagatagtggattaatagcttttagtaattttggaagtccactaacagtcgctactgtgcctacggcatttgatagatacacaaaactaataatcataaacaaagctaaacccataccaactgctttaaaatttttaataaagaaatactgactatgaattaataaaaaactaaacagagtcataactaggaaccaagatggtacatattcaggcatgacatgaagacttctgcttgagataactcccagtgctaaaccaataacaagagagaggcctgaaatgacaatgacatttaaaaagtctgtttgaagccagcggttgacattatacctatctgtcaatttcttaataaggttttgagtcgcaaagatatatgctgtaaataggctaacaacttctaataatagtatccaagtgaatgggcgataagtattttcagttgccctaactgcagacgctgattcagcgacaggtcgtgataagaaattaaggagaatatcatttggcactccatttttataagcagtattaaaaactttagagaaagaagctacgaaatcaccattattggccaattctttttggaagttagccattaaatcggttgcatccgtcgaaagtttgttgcccgaatttttagcatcttgaacatctttattgaatgatgtgaatatttgattaacttggtccgcctcttgactattagatttggacatatcttttacgcccgctgcagaggtcattagcccatctagctggttcttcaaatcagataattgttgatcagttgttttctgtgagtcgtttactttagattgatcctgtgtgatgttttggaccttcatgttaattgattgaagggtttcaagctgttttttgattgcatctgttagtcgtacatttgtctcagttacttttgccatttgatccgccaattcatcttgactattttcaacttcctccatgacatctttaactttctgttgcgcatcagcagtgttttcatccatcaaatacttagttataccatttttgaccagatcaaccatcgtatcgttaacactttgatttaaaaattgatcaaataaattttgcggttcttcgccatcagaaataatgtagtatttagctactaatccgtgagtggtgttatatgcatcatttacttcttgtagagttcgttgatacgttgcctctgcctcaaagtaagaccgttggattttaccgtcatcattttgtacaatttgtttctgattcccgatagtgattgtatagcttggtttcgtaatactagagttagatgattccctttgataactgctattgataataatattattgttttggctggggtccaaggttcttgtttgcttaccattaaccgtccaggtatctaccctgtaatctggattatttgattcaacagaaactatctgctcaccagttcgagtagaactagatgacaattttaattgattaactttatttttagcttcatctctatttttcctagcttcaaaaagacgattcaataaattagtatttaaatacagagttctttcgttgcttacttttttaatgatttccgaatcagaagatgtaaactgaatggctttttcttcttcttgggttaagtgcaactccgaaaggtttagtgaaggaatgcttgaaatgagagaatttgtgaaatctgctaccttagctttaaaatctttcaaagtcttctcattagtagaatgactcttcaataattctaataaagtaatattatctttattattcttagcaaagtaacttgctagtccctctctaacaattttatctagttgttcactttgatctttagcaatgttatcttgtgacttgagtgcttcagatagttcttggattttttgccttgcaacatttagataagctgatgagttttctttatgattatgattgttatcatcacccataatactattgagttgtgatgataatgtttcttggtctttttgtgcttgtgtgataatatcagataattgcttctctaataactcgttattcatttctagtaatgaggtcgaaaacgcttcatacgaaatgctatcttgatggcgctgttctattaagcttgataaatcttttccagtatttgtctgggttgtcaccaaatcattaaacatgttatcagaagcttctaaagattttttcagtgattcgttagcagtaatggaactactagactggttaacgagggctggaaagatattttggaaattagttgcagaatctaaaagatttttttggtaatttgagatattacctgactgaacatttaccatggcctgtacattttcttgagctgtatataagttacttaaaatacttgccatgtacatatttactaagtggctatttaactctgaaacaatatctttctctttttcagttgcctttttctctaatgctaaattccccttggcattaaccttataagagatagttgtttgctctgcatttgctttattgacatcaagaagtttttgagaaaagttattagggatgataaccattaattgataatcacctttgtctaatccattttgagcagtacctcgactaacaactgaccaattttgactattatcacgttcgatagacttaatataactagctcctaaattataactttctttaccattagatacattttgatcttcgttgactaatgctatatttagtttagtgttagtagctgactgtgttgttttattctcttttgcatgatcgccttgaagcttaagattaaggccagcaatagctactaaaaagagagcaacagctataatataccaaagtattctaaagttatttcttttcataattcttcctaaaatatattttattttcaacaaaataggaaggctttgccttcctattcacttatagactatgatacgatactatccactaatttgagaagcaatatctgcatccgtctgctcaatgatatctgcaacttttaataattgctggttaatatcttcgagtaattgagcaaattctgtaatttttggagataattcattgaattgtgcttcaaaagaatcaaaagtagatccatcccaattttcgtcaataactgcttgctcttgagtaagcaaattaagaacttctgttacttgttgagaaccagctgtgtacttttgtgctgatgagcgaagttcttctggtgttaatttaatttgtgccataaattttctcctttttctataaacacttttgcaacaactgcataattattacaacatattttttaaaatatattcaaatttactgcattatttaaaattatttttaatgttattgtttaatcctgtttattttcatctatatcaacaatctgtccttgttgatttaatcgaaatcgtgtcaattcgtgaaagaaaatctttttataaaaaccatgttgcttcttagcattgactcttttagaaatacctaatttatcatctgaactattaataccaaaattaccaatgtaatctttattaatacggtaactatgatacttctctggatgtgaaattacataggatgtggctgcttcagacatattgttaatgggactaggggaattaaaaacacgcgctgataatctcatttctgaagccacaatcatggccaaataaccacctagagaatggcctgttaaccagagggttgcatcaggatagttcatcttaattttttgtgcaaatagtttagatgttgtaatttgacttggatttttacaaggcagagaaatgccatcctctctcagggtaatacttgaaggacaagttagcaatttattgttcttccccaatacaactgaatcgatatctgttaagatatctttcttattaaaagcgttcgttcctgaatatgctataacaatatgattactttcatccaaagactgacatgccatagcctgcataccattattgatatcatcattaacctctaataccataaaagagcgtttttgatggaaatcaataatttgactaccttctataatttgaaggtgtccattactttctgctttggatttttcaatattatatgccatatctgatagcactttaaaactactatctggaatcattcattttcctctctattcaaagaccaggtgatatctaactcatcaatagactgaataggttcctttttttctctaggtctgagatgaaaacttttaggatgacaaataatacctgaaatactattactgtcactaatatcatcaacaatgtaattgataatattaacgccatttattgttataatagaagaccatgaaccagtttctaaagaatgcctccactttgaaaaaacaagttgttgaatacctagatatctgtgtactaaatcaagggcgatttttgtttctaattcattaatatgtgttcgtgtttttaacataattaactccttaagtttgttccctattttatcacaattaggctttttttataaaaacagaacaagctatatttaatctagtccgattctgttttgctggaagttaattttaccttgatcgtttgattaatctagtacttttaatgtaaatgctctgctttcaagaactttgaacattgcatgtgcagtatctaaagatgtaaatagaggaactccttgttcaattgcagaacgtctgatgatgagagcatcatggttatcaatgttattttgtccaactgtgttgataactgcttgaatcttaccatttttaattaaatcaggaatatgatttcgatcgttctctcctaacttacctactaaaactgtctctaaaccattagcatcaaaataaattgcagtcccttgggtagcataaatacgataaccaatactttgatagacttttgcaagttctaaagcttcttctttatctgtatcatctactgtaaaaacaatgttaccatagtctggcatatggagatatgctgcttcaaaggctttatacaaggctttctgaagattaatatctgatcccatcacttcgcctgttgatttcatttcaggacctaataaactatctactttagcaagtttggtaaaactaaagacaggggctttaatgtggaccatatctgaagctggatagagatcataaccatatgtaaaattgcagagtttatctcctaagataacttttgttgctacttgggccataggaatgtgagttacttttgataagaatggaagtgttctactagcacgaggattaacttcaataacatatactttctgatccttgattacaaactgaatattcatcataccgatacagtttaatccaattgctaagcgttttgtataatctacaatagtttcgataatggtctcagacaatgtttgaggaggatatacagccatggaatctcctgaatgaacaccagatcgctctatatgttccattattccaggaatcagtatattctgaccatcggatatagcatcaacctcacactctttacctataaggtatgcatctataagcactggatgatctgggcttgcctttaccgcggttgtcatataatgacgtaaatcttcttcgttttcaactatcttcatagctcgtccaccaagaacatatgatggtctaaccaacacgggataaccaatcttttgcgctgcattaactgcctcttcctccgtagtggcggtaaaacctggtggttgagggatatttagagcttgtaaagtggcttcaaattgttttctattttcagcacgatccaaatcttctaattgtgtgcctagtattttaacccctgccttgtttaaatcttttgctagattaatagcagtctgaccaccgaattgtaagatgaccccttcaggtttttctaagtcaataacattcataacatcttcaaaagtcaaaggttcaaagtaaagcttatctgaaatagagaaatccgttgagaccgtctctggattagagttcatgataatcgcttcaaaaccagactctctgatggctttaacagaatgaaccgttgcataatcaaattcaactccctgtccaattcggattgggcccgatcctaaaaccaaaatagaggctttatctgatatcaatgactcgttttctacggcataagtcgaataaaagtagggcgttgctgaatcaaactcagacgcacatgtatcaaccatcttataaactggaagaattcctgcttcttttcgcatgttacgaacttgatcttcgtttatttgccataaactcgctatagctttatctgaaaaacctttatttttaacctttttgagaatattgatatccagtctgtttttagataatagatcttctaactctacaatcactcttaacttatcaaggaagaaagaatcaatgctagtcaaacttgctaatttttcaatactataatgtctacgtaaagcttctgctagataaaataagcgatcatcttctgcctttcttattttttctaataaaacatcatctgatacattatctaaatctgctattttaatgtgatcgacacctatttctagtgaacgacaagctttcaacaaagattcttctatattccgtcctattgccatgacttcgcctgtagctttcatctgtgttcccaattttctatcgccactttcaaatttatcaaaaggaaatctcggcatttttgcgactacgtaatctaaagcaggttcaaacatagcgtaagtcgtttttgtaataggattaattacctcatctagtgtcaaaccaacagctatcttagctgctaatttagcaattggatatccagtagcttttgaagctaaagcagaagatcttgatactcttggattaacttcaatgacatagtatttaaaactattcggatcaagggctagttgaacattgcatcctccttcaattttcaaagctcttataatatctaaactcgcatctcgtaataactgattttccacatcagataacgtttgtgcgggtgcaaaaactatagagtcccctgtatggataccaacaggatcaaaattctccatattacaaacaacaagagcgttatctgctgcatcacgcataacttcgtattcaatctctttaaagccagcaattgaacgttcaataaggcactgtgtcacaggcgataactttaaccccttcgtcgtgatgtcaaccaattgttcttgattatcgcacatgcctccacctgtacctcctaaagtaaaggcaggacgaacaattaatggatacccgatttgctctgcaaattgaatagcttcttctaccgaattaacaatctcagattctggaataggttgattgagttcttccatcaactgtttaaataaatcacgatcttcagctttatcaatggctgataatttggtccctaatagttcaacattcaattcttctaggataccattttttgatagagccatagccatattcaatccagtttgacctccaagagttggaaggagagcatcaggtctttccttcctgagaattcttgtgacaaactccaaggtaataggttcaatataaactttatcagcaatatctttatctgtcatgatagtagctggattcgaattgaccaaaacaacttggtatccctcctcttttaaagagagacaggcttgtgtaccagaatagtcaaactctgctgcttgtccaatcacaatcgggccagaaccgataaccataattttacgtatgtctgtgcgctttggcatatcaaactcctctaattctatattttaaagctagcttttttgctggaaatcatcaatcatattaataaattcatcaaaaagataagatgtatcatgcggccctggtgctgcatctgggtgaaactgcactgaaaaggcaggatagtatttatgtcgaacaccttcgacagttttatcattaatctcttcatgtgtaatgaagagagcctcagggaaatcttctctcgagacagcataaccatgattttgacttgtaaaatcaacctgtcctgtttgcaaatgacgaacagcatgattaaaacctcgatgaccaaaagtcattttataagtctttgcaccattagctttagcaaatagttgatgtcccatacaaataccaaaaattggaattttaccttgaatttcttggatcatttgtaaagcattcggtaattgttctgggttcccagggccgttagataagagtactccatctggattgagatttaagatttcttgcgctgtcgtagtatgaggaacgactgtaatatgacattgacgttgtgacagttctcttagaatagaatgttttaaaccaaagtcaactaatacaatatttttgccaactccaggcgaagcataagctaatttggttgatacttgttcaatttgatcatttaaaagaacacttttttgaaggttttctagtgcttcatgaatagaatttccctcgtttattaaacaagctttcattgttccatgttttcgaataatttttgttaatgctcgagtatctatacctgaaattccaggtattccttttaattttaaaaattcatcaagtgtcatctgttgacgccagttacttggatactctgcccattcataaataactactcccttacatgttggtctaatagattcgtaatcgtctcgatttatcccataatttccaataagaggataagtaaaagtaataatttgaccgttgtaagattgatctgttatagattcttgataccctgtcattcctgtactaaaaacgatttcaccacttgtttctacatccgctccgaaagcctcaccctcaaacacactaccatcttccagtaataatagacgcttcattttatctcctttattatctgctattgagcactgcttctaagatagctatccttgcatagacgccattactcatctgtttcactattcgagccttatctgcttctaccaaatcgctagcaatctctacatccctattgacgggtgctgggtgcataataattgctgtatcccttaaatgtttatagcgttcttttgtaagaccaaattgttgatgatagctttcttttgaaaacacccctttaccatcatgacgttcgtgttgaacacgtaaaagcataaggacatcaatttgatcaactaactgatctattggtaaatattgcccatattcatcgaattgactactataccattctttgggtccagaaaagaaaatttcagctcctaatcgttttagcacttgcatgttagatttagctacccgtgagtgagttaaatctcctacaatcgcaatttttagccctttgaagtatccaaattcttcgtaaatagttaccaaatccaaaagtgattggcttggatgttggcctgagccatcacccccattgacaatagctgaatgaatgttcggactagcaatcaattctttataatagtcaatatcaggatgcctaatgacacaaacgtccaatcctagagcactcattgttaagatagtgtcataaagggtttctcctttattaacagaacttgtatcagcattaaattcaattgtttttaatcctaatttgagttctgccatttcaaatgacttatgtgttcttgttgaattctcaaaaaagagatttgacacatagtaatctttatcaaaaccaatgttgctaggattttctttaacttcgatacttctctttatcaaagacataacttcttgatttgataattcttctaaactgacaaaatgttctaatgaaagtgtttgtgtttgatgattcatgataatttctttctataaattttagctagaaaaaagcctcctaaaacaaggaggctctgcaaaatagtaagctagatagggaactaacttactatttgttaacgcaattccttgtttgcctctctggacaataccttaaaggatattaataagaaatgttttacctataccaatgtcgctgcgtggctatctttttgatagactatttcaccattgcaaattgtgtagtgaataactcccttcaatttatcaccgataaaaggagagttgctggatttggaggcaaattctgcctttattattctctcttcagcttgatcaaaaataacgatatctgcaggtccaccttctctgagataacctgcatcaaatccatataactgtgcaggattacatgtcatttttgccaaaaagtcaatcattgagagttctttagtagatactaaataagtaatccctaaggctaatgatgtctctaagccagtcataccagagggcgcttgactaatattatctgctgctttctccataatatgatggggagcgtggtcacttgcaataattgaaataacaccacttttaagtccatcaatgagggcttgtctatccttttcaagtcgcagtggtgggtttaattttgcattagcacccttagttaaaagtaagttctctgtctttgaaaaatgttggggggttacttctgctgttaagttagcaccaagcttctgcgcaaaatcaactacttctactgattctgaacttgacaaatgctggatatggactttcgcctgtgtttggtaagcaatcatagcatctcgcgcaatcattgaatattcagcaagaccactagctccacagacatgataaattttctgagcaatatgttcgttgataccaaggacaccatttaacgatggatcttcttcatgtaacgataggacaacatcatgttttctagctaagttcatagcttcttgcaaaaccttagtatctgtcaaaggaataccatcgtctgagaatccagcaactccagcctctaatagttcttcgaaattaactaaatctttaccattcagagatttagtaattgtagcaactgtttcaatcttaattgcttcttttgctgcactctccttaacttgttttacaatttctgggctagaaatcgttgggttagtattggccatcataagaactgtcgtaaaaccacctactgcagctgatagggcccctgtatggatattttctttatgtgtctgtccaggctcacgaaaatgtacatgaatatcgactaatcctggagctacaattttattgcttgcatcaatgattggaatgcctttaatatcaatttctttcgatatttgtttaatttttccttgatcaatcagcatgtctgatacttgattaaaaccactttgagggtcgataatcaatccgtttttaatgatatacatatctgtcctctctaactttgccaattcatttgatcttctttaaattttttcagtaataccagttggtcagctgtaatatatccattaactttagcaactttaattaattgattgtaatccgtcaaagtcaccaaaggaatatcagcttcacgaaatgcttgttcagccttagctaattgatatgtaaatatcgctactacccctaaaacctcaataccttgactctgcgcagccgtaacagcctctaaaacagatcctcctgttgaaatcaaatcttcaatgataaccattttttggcctgagtaaacacgtccctcgatttgattccccacaccatgatcctttgccttcgatcgtatataggcaaagggcaagttcatcttatcagctataatagcgccatgtggtatgcctgcagtcgctgtccctgctatgatatcaacgtttgggaaatgtttctgtatttgtttaacaaaaccattttcaatcagtgtccttgtctcaggatacgataaggttacacgattatcagtgtaaattggcgatttgacccccgaagcccaagtaaagggttgttggggtcttaagtaaacagcttgaatatctaatagttccatggcaatctgtcttgctaaatccatctcagtactcctttatttaatacgattccattcttcttttatctctagatatgcttgatatggattttctgctttcgttataggtcttcccacaacgatataatcagccccaactatacgtgcttgctcaggagtcatcgttcttttttgatcatctaactgattggtttgtggaggtctgataccaggcgttaagcaaatgaaatgttcgttagtctgtttcttgatttgcattccctcttgagccgatgcgactactccatctaagcctgcttcttgagctttttgagcataatggcaaaccgaatcaactacacttaagttaatatgttgatccacctgcatttgttcttgtgaagtcgaggttaattgtgtcactgctaatagtattggacccttccccaaaccttctctagctgctttcatcatttcgactcctcctgcagcatgcacattagtcatatcaatgcctaatttggctaagacagacatagatgatcgaactgtattagggatatcatgtaattttaaatccaaaaaaatgcgatgtcctaaggatttaatatatctaataattgagggaccttcggaataataaagctccattcctattttgacaaaaagcaattcttcttttggaaaatgttctaaaaaagttgttacagaagccaaatcagaaaaatctaaggcaatgatagggcatttttctaacatataattcctctctatagaaataataattgttggaaatgtaccagtatgacacaaaaaaccttgcctgagggcaaggtttcataaaaagttagcgaaaaagcactcgctatttgacttatgatggtgaccttgttcgcctctctggactcacttaaagatacatttgtaggtattctacaagtttacaatcattttgtcaaataaatactaaattattttatcattttacgtctaataaagaacgatagaggaatctgctgtacaatactgattgctatagcaattgtaaaagctgttacaaaacaggatctaaaatattccattgctacggcatctgctcccgtcaataaaaagtaaacagctctatagaagctaagtcctggaataagaggaaacatacttgtcgctaaaaagacagtggcaggacacttacgtttagcagctaatagccgtgaaaaataagtgatgaaaagccctggaaaaaatacggctatagcatccatgtgaaattgttgccataagatcaggtagagcatccaagatattgctcctagtatacctaagtcaaggaaataacgttttggaacatggtagagaatagagaaggctatcgtccctaaaccggccattagtgttctgatgataatctcaaggatggtattaggaacaccagaaaaagaacctgtcatttgttctgcaaacggaataatttcaattgtaatagccacacctgctgatatagaaatacaaatgagtaaagcagacataatcaaagctaaacctgttgaaaaattattctgtgaaaattctctcaccgaattaacaaaggcagcccctggcaccataaccattagtgcccctaatataataatgctacgatgctcacctaatcctgaaaaatataataaattagcacttaaagccactacagaactacctagaatggtcaaaagaaatcctgtatgtatacgactttccatcaaattcagaaaatatcctaaaattaagcctgttacagcagcggaaaatgaatctaataaggaactacctaaggctaaagaaaaactacccgctccacaaaaataagaaattaaagtaacaagtaaactataatctttttgatgttcaattaagtctaactgctttacaatttcttctggagatactaagtcttgtttagcaatttgcctagaaaggttattaacagcttcaagtctacctaaatttgctgttacaccatctgtattgcatactttagcttcttgtttaccatagcggttaatcccggaagcgataatactgctactaaccacataagcttcaaaattttctatctgaagagccttagcaaaatgcttcattgtgtcttcgacacgatagacttctgctccgctttcaatcagtaatttacctgctctaagaacaacgctcatatcattttgcatcttatttggccctgccttctactttattaccttagccacttaactaagttggttaaagtcccaaacatcatccatccatccttcataaaagtccggttcatgacataccatcaagattgatcccttataagcttttaaagcacgttttaactcatctttagcatctacatctaaatgattggttggttcgtcaagtacaaggacattattttcgcgattcattaataagcaaaatctgacctttgattgctccccaccagataacacctgaatctgactttcaatatgctttgaagttaaaccacaacgagcaagagctgccctaacctctgcttggttcaaagcaggaaaagcatcccatactgcttcgagtggagtttggcgatttcctccgggtacttcttgttcaaaataacctaaatcaataaaatcacctcgttcaacattaccagaaataggggggataatacctagtaaactcttaagtaatgttgtttttcctatcccatttgctccaacaatagctattttttgattacgttcaaatgttaggtttagaggttttgttaaagcacgatcatatccaatttgaagatctttagcttggaaaataaaacgtcctggtgtgcgagattctttaaattcgaaacttggctttggtttctctgcttgtaactcaataatatccattttgtctagtttcttttgacgagacattgccatattacgtgttgcgacgcgtgctttattacgattaacaaaatcttgtaaatcagctatttccttttgttgacgttcataggctgcttctaattgagcctttttcattgcatagactgattcaaaattagtataatcaccggaatatcttactaaatcttgattttcaacatgatagacaatattgataacatcgttcaaaaatggaatatcgtgtgagattaaaacaaaagcattttcataattttgtaaatagcgttttaaccaatcaatgtgttcagcatcaaggtagtttgtaggctcatcaagcaggaggatgtctggcttttctaataacagttttgctaaaagaacctttgtcctttgaccaccagataattcagtaacatcagaatccataccaaaatccataactcctaatgcccgtgcaacttcatcaattttagcatcaagtgtataaaaatcacgtgattctaaacgatcttgtagttctccaacttcttccataaggctatctacatctgcgccatcatctgccatggatatatatatatcattgatacgtgcctctgttttaaaaagttcatcaaatgctgttcgcaaaacatcacgaactgtttgaccttcttctaatacagtatgttgatcaaggtaaccagcagttacatattttgaccattcaatttttccttcatcaggttgaagatgacctgtgacaattgacatgaatgttgattttccttcaccattagcaccaataagtcctatatgttcaccttttaaaaggcgaaaagaaacattctcaaaaatagcacgatcaccaaaaccgtgacttaagttttttacttctaaaatactcatttaaaatcctttgattgataatagaggttattaaaaaactcatagagacactctacaagtttttaaattagtacattacatagtaagttccatatacaagtatagagagtttaaacttaaaagtcaaaccttacttaattttttcaaagtgtaaatgaacagtgatttgatcatcatagccatttcgctctaaatcacgttgcaaacggtatgaaatatagtgttcagcagtatgaatgtatcctgcatccaataaacgattttcaaccaaagactgaatcatattgatcgttggtcgttcaacctgagcatcctctaaatctaagattacttttttagtcacttgagcaaggtcttgacgaagtgactcatcaagcacataaactgtttgagcagctttcaagatagcttggtagattttttcaggatcaaattcaacaatctgtccatcacgtttgatgatttgcataagagcccctccttaatgtggaaacaatgttaaaacgatttgcaatcattttcatttgttaatttcattatgcaaatgttttcataatttgtcaagtgttttacctgatattgacgaaaaatcaatatcactagcagtcagcataagtattaagcaatgtcatattcttctatattaattcaaattttaactcttttgctggtttaaccagcccattcttatgcaatgtttctgcaatttgaacagaattccaagctgcccccttcagtagattatctgaaactacccacatatgaacaccattttcttgatcaaggtcttttcgaatacgaccaacaaaggtctccctatggcctacagcattaatcgcttgagggtaaatttgctgagatggaaggtcttgtaggacggcaccaggaaaatttgcaatagcctttttaatttcagagattgaggctaattctttcgtctcaatataaatggactcagaatgccccgataaaacgggaatacggacgcaggtagctgaaaccttaatagtagcatcttccataattttctttgtctccaaagtcattttcatttcttcgtacgtataatcattatcagtaaaaatatcaatttgaggtaatgcattgaatgcgataggataatgtttttgatcgctagaacatggcaagactgttgcaattaattgatcaggtgaaaggttatcatttaaaacttgtctcaactgttccttagtttcttcaacagcacgtgcacctgaacccgaaacagcttgataggtggaaactataacacgctctatcccccatttttgacgaatgggctctaaagcaatcatcatttgaatagtagaacaattggggcaagctatgataccattatgaccaatcatggcatgagcatttacttcaggaacaactagtggaacatcaggattctgacgaaaatatgacgtgttatctactacaactgctccagactttactgcataaggagcgaactttgctgaaatagatccaccagctgaaaacaaggcaatatcaacatcgtaaaatgattcttttgttgtctcttcaacacgtatagcctcatctttaaaatgtaaaattttacctgctgagcgacttgatgataaaagtttcacttgttctattggtaaattcgattgttctaattgacgaatcatttgtgttcctacggcacctgtagcacctacgatagcaacggtatatcccatataatgacctctatttggttgatgttgttcatcaatattttcaaaacattttaatgtgactattatactacatttttataaactttcaagaatagccaaatgaaaaaagtcaccctaaccaacctaattataaaaaggaatctcgtatccgattcctttttattgattgcatatatcattatatatagttactaaatgattgattatacttaattttcattgcgtctcaaaccgcagcgacttgttaacaaaattaaaccaaaacctacaagtttaaaaatgacattttgatcatcacctgttttaggtaatttatttatcactgaaattgttctagaattattagttaacatcggtctattagctacattagtaacctgagatacttttttagagaatgactgtttgttagagtcaccttgactagagtgattattttctctagatataattgactttgaaagaagtggatttttccctataagttgacctacttggctcttgttctcaacatcgcgttgacgacgctctaaaacattgccctgactttgatttccaagttctaaaacctattttattgaacaattaattttctccttactttttttaaattttaaaagtcattttattattacttttatttagattatatattaaaacattttataagttatgtcaagataatttattatttagttgcaatttattattaatttgtatgtttaaaattaaatagttgatatctaaaacatgatatttttaaattttcctttaatattataaagcatgatagatagtcatactaacattaagatttacaatgaggtaatagtatatttttaatacttcatctaaaccatcagaaactagattatttaaaaattttacaaagaatgtgatggtagcatattcaattaaagttaagtaaagacataattttaagaaggaaattgtgacttatttatgcaaaaaagaaagaaccaaactggttctttcttttttgcttttcagctacttaccacaatttgtaagaaattacaagtagtagtaagctaagggcaccttttcaagtgtgacaagaaggttcacacaacttatcaagatccgctcctgcgtttataatctccctgcgcaatagtggtaaaaccacatatcgactcatcgcataacagtagtttaacataatttagttaaaatgcaacctttactttttaaatataactagattcttcagtttacttttaatattaaattaaaaataaattatttctaaagcaggggagcaatagtttttgtcactatgccaattactttttggaattttggaatattatttatatctttcaagctaactaaccttgatttatttaatgtatccatataatctcgataaatgtcttggattgcatctaccttataaagataaacagcacattcaaaatggtgatacaggctacggtaatcaagatttatcgtacctacaacagcctttgtattatcactaaggaatatttttgaatgaacaaatccaagggtgtattcatatattttaacacctgattttgttaaagcttgatagtaagttttagcaagagcataagggattggcttatctgggatacccggcataataatacgtacatctacaccacgttccgcagcaaactgaatggcatgttccaattcactgtctaatattaaataaggtgtcatgatgtaaacatattctctagcatgattaagaatatctatataaacattttcccctactttatcagtgtctaaaggagaatctccataaggaataacatagccttcattttcaactaaatcatcgtgtacaccgaggtaaggcgctactaacattttttcctcagtaatggaccacatctgtaagaaaagtaggaggaaactatccactgctttcccctttaacataatacctgaatctttccaatgcccaaataactcaatgtgattaatatactcatcggctaagtttacaccaccagtcatgcctactactccatcaataacaacaatttttcgatggtcacgatagttataataagttgaaataaaaggagaaatcggagaaaatgcttttgcttttattcctattttctcaagtcgtttcgtataatcaaaggataattttgtaatttctatcataccatcatataagatacggacttcaacaccttcttccaccttttgttctaaaatactaagtatttctccccacattattccttcgtcaatgataaagaattctaaaaagatatactttttagcttttagtagttcttctttcattttttcaaagaatgcttctcccgttggtagaaatgtcacatcagtatttcgataaactgggaaatttccatgtgctttttcaaaatattgaaccaaatgatatgttgtggatgtacttgacttaagctgattcaaagtttcaggatcatcctctagataaatctgactctcatcaatcaatgtctccaatctttgtttcaaaccacgataaccccagtcaaatttggtgtacattaggaacatcgcccctagtaaaggggcaatcattaccaatattaaccaagttactcgggacaaagcatccatttcactattaactaaatataagaccgctccaattgttaagatatgctcaacggttgctaaccaaacacgatactgctctagccatgagtaagaggctagtaaaaacaataattgtaaaatcaataaaatagcgataacggttgttcgactaaatataccccttagtaaacttttcttactcttattaagtaaacgaacaattttgactttattactgataagtttttcccccctccaaatcaatcattttattatagcatactgtcacttgaatagcattctattattctaaattatctctagttaaaatctaatccccaataaaaagaggctagcatcacaagccctacctctttattatttaaaataatccaatggctgtaccgtcttctaaaacatccatattgagagctgcaggttttttaggtaaaccaggcattgtcaatacgtctccagtaagagcaactataaaaccagctcctgtttttggaacaaattcacgaacagttatatcaaagtcagttggagcaccaagtaaatttggattatcagaaaagctatattgtgtctttgccatacaaataggcatcttgtcccagccattgtcactaaactcttttaattgtatttgtgccttaggtccaaaatgaactttattaccaccatatattttagtaacaatttttttaattttttcttcaatagtgtcttcatcattatataagcgtttgtaattggatgattgtgtttcaatcacattagcaacagtctgtgcaagttcaagaccaccgtctgctccatcttcccacacacttgctaattcaactgccacatcaatattactacataaggttttaagagttgcaatttcactttctgtatctgcagtaaactgattgatagctacaactaccggaacaccatattgacgcatattgttaacgtgacgctcgagatttgtaaaacctcttttaactgcttcgacgttctcttgtgagagatcttcttttgaaacacctccatgcattttcaatgcacgcaatgtagcaacaataacaatcgcatcgggagaagtcggaaggtttggcgtttttatatcaagaaacttttcagcgcccaagtctgctccaaaacccgcttcagtaacaacgtaatctgctaagcgtagagctgttgaagtcgctaagacagaattacatccatgtgcaatattagcaaatggtcccccatggacaagagccggtgtcccataaatggtttgaaccaaattaggtttgatagtatcttttaggataagtgtgagagctccttcaatcttcaaatctttaacatagattggtttacggttccttgagtaagccacaacaatatttgacaggcgtttctttaaatctgataggtcagtagctaaacatagaatagccattatttcagaagcaacagtaatatcaaagccatcttcacgtggtatcccattgacagggcttcctaagccaacgatcacctgacgaagagcacgatcattaagatcaactacacgcttccaaatcactcgacgttggtcaatatctaattcattgccttgatgaatatgattatcaagtagagctgataaagcattattagcagttgtgattgcgtgcatatcaccagtaaaatgcaaattaatatcttccattggtagtacttgtgcgtatccacctccagcagctcctcctttaatacccattacaggacctaaagaaggttcgcgaagagcaatcatcgtttttttaccaattttatttaaagcatcagctaatccaatgctcatagtggattttccctcacctgctggtgtcggattaatagcagttactaaaattaactttcctactttttgagattttacagcttcaatcttatcaaaagataattttgctttgtatttaccatacaattctatatcatcaaaaccaattcctacttgctcaacaatctcagcaataggctttagggcgacgctttgcgctatttcaatatctgttttcatgatattctccttctaaataataaaaatagtatagcaatattccctataaaaacatatttttttgcaaaaaaaatttaaaatgttcgttttatgaaaataaaactgcttttatttcttctggactagtctgaccaaaataatcttctaatgataaagtacttaatttttccaagactaattcttctttcataggacaaccaatgagaaggttttcaatatctgaaatatctttagaactgaaaaagtcaccataaatacggcaattcgtaataatacctttctcaatttctaagtgaaaatcgtaagttcctgacggaaaacgagcatctctgtgatacgaatactgtggtgagttaccataattccaatcccaattcttatatttttcatcagctagagcgtcaatcgcagcccaatctttttcggttagatgatagcgttttgcctgatcaatatgatcaatatgtaataattgacaaaccattaaatctttaaattgatcggttgtgatatgacgataatcttctgacaagtggctacgaatatctcctactcgacttcggacagattttatccctttagattcaatttttttccgattaggatttaacactttttccatagcatcaaaatcaacatctaataaaagagagtaaccaccgtaaatacgaccgtttactatcgtcattgctgcacctgatacttttttaccatcaataactaagtcatttcgttccctcatttcaacactagaggcacctaaagtttttagggccttaatagctggctcataagctcgtttgaaatcaccaaattgtccatgatctttcatgagatagcaaatatttacagcacctgagtcaacgtaaacagcccctccaccagtatctcgacgaacaacaggaatatcatgttctttcaaatattcttgatttgtctctataactgcattctgaaattttccgatttcaactttgggatcacaatagtatggaaataaaatatcatcatctaaaaaaacattttgtaaaatataaacttgcatggcaagtgcaatcgcaccgtctgtgatacgcttaccatttctaattggttcaataagatacatttaggtctccttttatagcaatttagttatccaataatttcttttttcgcttcagcaattaattcagcgatatgctgtgtcagttgcacactccttgagcgaatcttttgaggaatgcgataatgcttgtgattaagagtaacaaataaagagttttcatttaaagagacgaatcgccaaaacggatgcttaataaattgtggcgtggtatgtccaactccaatctctagataaagaactttgtcattttgatgttgtgataagaaattttcataacgttgtcgttgagcatgaaagtcagcatcttccaccatacctttttcttcgttacgtttattaatttcaaacggttgatcacactttgggcatttggggattaagttactaggaatcttcatatccttttgttgtgcaatcatttgacgaattgcctgatcatttcgataagtttgttgatgacaatgttgactacactgccataagccatattcaccttgaatatgaaaaactttttctaaattataatcagccacagcgaaggcattatcagcattagttgtaataatatgatattcttttttcgctaaaatatcctttaaatcaagataagcttgtcctaccggttgatctaaataattaagtgccacaaaacgactttggaaggcccaatattcttcccaatcttcaaagtcataaagacttgcttgcaacatatctaatagttgatatttagcaataaaatccggaaaagcttcttcaaatctggggccaatataggtgaatccatccgctgcagacatgcctgcaccaataccaactacaatagcatctgattcttctattaactgacttagtatttctgattgagaatgattagttttttctagagtcttccacactgtcatctatttcctcttttaataataatttttgataaatatcttggtctttaggtgtgaatgtattgaaaataatatagagtttgtgctgattttcgcgttgccactctaatatcgcttgaactgccaattcagcggctctttgattaggaaaaccaaattctcccgttgatatacaagggaagacaattgttttaagattagctcgaactgccaattgtaagcaagatttataagaagactttaataaatcctctcttatacgagatggcttttgatcaacttttacataaggtccgactgtatgaataacatacttacaaggaagatgataggattcggtaagtttagcttgtcctacagcttccattcgtccttgttgtgtcatcaattgatgacatgctaaacgtaatcgtgaacctgcaaacgtatgaatctgattgtcaatacaatggtggttaggaataaaacaacctaacaatttactatttgctgcattaacaatagcatccacttgtaataagcaaatatccccatggtaggtaaatacatttgaatataccgtttgatgacagacgtctatcgtttttactttttgagtattccaccaatgtgacaaatacctatcttctaaagacaggtactcttgactaatgttttgaggatcttgttgattaactagaccacgccaaaccgtttgcaaatcggtggtcctcaagtcatcaacgtctgttaatttttctgactgaagatactcaatcatggctagcaatagttgtttttgattaggcattttctaaagcttcaaaagcagcataatcaacttctgttaacacaaccaaccaattttcgtcagctttttcagaatttaacaaagttggttcttgacttgcagctgtattaactttaacaactttacctgtaagaggagataaaattgccataaccgtctttgaagcttcaatatttaaaataacatcatcaacttctaaatttgcatcatctgtgaattccacatatccaacagttcccaagtcatcttgaagttcgggagttaagctgatagtataaagttcttcatttttttcaattaataagtagttcgcaatttttttcatgagtattttcctttctgagaaaacgtgattaatataactgtgataataattttaaggatttgattcgttggtcaagtcctggaacaagaggaatcaaaagtagttcttctgcttgactagcattaactaaagcgtcaagactttctttaacttgttttggatcacctacaatcatacggtcgcgatttgatttaatttttgctttttgttcaggagtcaattggtaatgattagcttcttcaatagtaggaaatgttgcaaattcattgaagtctttatttcctagcatccagatatctaaagtctttgctatgttttcagcttcttctgaagtatcagctataactacaaatgcagctaccatcaaattaggagacttattaggataatattcttcaaactgatgataataaagagatgaaagctttttagcttctgtcaatgggtctttgtccataaaaggaaaaacaccgaaggtaaagcctaagccaagtttagccgctaaataagctgatttttgaccactccccaacacatataagtctgggaagctagaaagagtcggttgaactaatggttccttactggatgattcatcaataagccatgacttcaattcctccagtacctcttcgtaatcatgtgctttatgtaagctacgaagtgcatttgaaactttaactgtccctagtgaatttcctaaaccaatacttactcgattcggatgacatgtctctaatgtcttgagagtctccgcgagtttaaaactactatagtgcagaggcattatacctccagagccaattttgatagatttagtctggttagccaaatgcattatcattaattctggattgctaatactgaatgccttaacaccgtgatgttcagccacccaaaattgatgatagcctagtcgctccgcctcttgtgataaaagaatcgtttcttgtattgcatcacttgcagtttttccataatcaataagcccataatcaaggacacttaatttcatctttcctccctataattgcttcgaagttctctaaaaacttctcgagcttcctttggtaaagattctccataatccatcaaaggaacaatatctttaaaggaggcttttggaatcgccaaaccttctaaatcactcactttaatccttaaattaatctgatcagaacacttagcttttattttttgtaaaaattccggatcaactactaagggcgtggaagctcctatcatatgagcatgttgtaaggcttcaaacacctttgaagcactattaatacctccagttgccataattggaactctatcaccaaaatgttcaaatataacttgattaaccagctgccctttgtaaactccctcagaacgtatagtatttctaaagacatcatgcccccagcttgcaatggcaagataatctacctgagcaatcgctaaaattttttcaagaaattccataaactcttcaatgctatatccaatttgtgaaccgcgagtttcttcaggcgtcgctctaaaaccaaggataaaatctgactccgcttcttctctgataactttttgtaccgctttaaaaacttctaagcctaaacgacagcgattagtcaaagtttgaggaccatattcatcttttctttgatttgagaaggttgagaaaaaagtttgaattagtaatcgttgtgcagaagatatttcaacaccatcaaatccagcttgtatagctcgtcttgtagcctggacatattcatcaataatccttagtatatctttgtgtgttagttctttaacctgatgtgggtatggcgattgcaattgcatagggctgggaccatatacatatccgtgtcttgccaaagtgtgacttgagaaacgtccagcatgcgtcagctgcaaaacagctttcgctcccttagacttcattgctttagccaatttagtcaaaccaggaatgtcctcatcctttgaaacgctaaaaccatattcaaataactgaccatattctgtgatatatgctgctccagtaatttgtaatggagcggatttagcacgacgaacagcatatgctatgtcgtcatcagttacaaaaccttctgatgtagaagaattagttaccataggtgatagaacaaaacgattttctaagctcaatccattgggaagtgttaatggacgaaataaattaccttggacattattcatctctgctcaccatccccttattagccatagacttagcctgaaatctattaaactctgcaactaaatcgggtctaatcatcagtaaacgatcattaaaacctacttgtttaaggctaatcaacatacgatcaataacatcttctactgtcataggacaatctaatagatcagatagattagccataatttcaggatctacatttggataagcaattggactacccgtatcacctagaccaatcttataaaaatctgaaatcatttgactccgccctttttgatcgccacaaacgctaaggtaaattgataccgcaataccattctttatacggcgctgagccaagccagcaaattttttgccatttatactaagatcaaacttaccaggacaataggaggtctctacttcaaagtgctcaataggttgataaaaatctgaaaatatacttctaataaaatcgaccattataagatacccatctgagatagacaattttctctcaaaaacatctggaataaccaatgaaaaatttaaaattccttcatcagctacaactgcgagaccaccaaaattccgaacaactggttcatagccacgactgatgatttcttttttagctaattctaaatgtggtaattctcgatctaacatccccagaatgactgtcttagtcatcggccaaatatgcaaaataatttcttgatttgagcgattaatctcccttaaaaatacttctgtccatataaaaggtttttccgcgtcttgagcatctgtaacatagtctttaaaaatagatacaggtaactgcgctagatcttgccattccaataaatctgacatcctttctctagaaaactctgcaagatttattttatcgcaatcgcttgaaattttccagtaagtttccctcaaattccattactatcaagaagaaatatatcttttatttacgaaaagcatttttttatgtacaatatggctatgaaaattttgattacatcaggtggaactaccgagaaaattgataccgttaggagtatcacgaatcacgcaacaggaactttaggaaaaataattgcagaaaaatatttacgagaaggacatcaggtgacactcgtgactactaaaaatgcagtcaaaccagaatctgctaccaacttatccacatttgagattgaggacgttgactcattaataaaaaccttgaagccattagtgaaagagcatgatattttaattcatagcatggcagtgtctgactatacccccgtctacatggctgatttcgaaaaggttaaatcaagcgatcatttagatacttttttgcgcaaagataaccacgaagggaaaatatcatctgaatcagaatatcaagtcctttttctcaaaaaaacaccaaaagttatcagccttgtgaaaaaatggaatcctcaaattactctagtaggttttaaactacttgtgaacgttactaaagaaaatctttttaaagttgctcgtcatagcttaatcaaaaataaagctacgtttattttagctaatgacctcattgatattacctcaaaacatcacatagcctacctacttgaccatgataatgtgtataaagctaccaccaaagaagatattgctcaattaatttacgaaaaggtaaaaaaatatgattaaacgtattacactagccgtcaccggttcaatttcggcctataaagcagcagaccttacaagtcaattaactaaaattggctatgatgttcatatcataatgacacaagctgccacagaatttattacaccgttaactctgcaagtattatcaaaaaatcctattcatttagatgttatggatgagcataacccaaaaatcatcaaccatatcgaattagcaaaacgcacagatttatttatcgttgcacctgcctctgctaatactattgctcatctagcatatggcttcgctgataacatcgtaacaagcgttgctcttgctatgcccgatgaaactccaaaacttatcgcaccagcaatgaatacaaagatgtatcataatacaatcacccaacgtaacattgatattttgaaaaaaataggttatcaggaaattgaacctcgtattagtttgcttgcctgtggtgataccggtcaaggagccctggctgatatctctactatacttaaatgtatacaagaagttgcaaattaggctgtaaatttgtatactatttctagtttaatttaaggagttataatgaaaaagaaaaacaaatcctctaacattgctataattgcaatcttttttgctattatgcttgtcattcattttttgtcatcatttatttttagtttttggttagtccctattaaacctactttgatgcatatcccagttattattgcatctatagcctatggacctcgtattggtgcaactctaggcgccttaatgggggggatcagcgtagctaacagcagcattgttctattaccaacgagttacctcttctcaccttttgttgaaaatggtaatttttattcgctaattattgcacttgtaccacgtattctaatcgggattattccttatttcgtttacaaattactacacaaccgctttggtttggctatctcaggtgctataggctctctaacaaacacagtatttgttttatctggaatttttatctttttttcaagtacttataatgggaatatcaagctaatgctcgctgggattatttcatctaattcattagctgagatggtcattgcagctatcattgtatatctaactgttcctcgtattctcaatattaaacattaaaaactggccaggaagaaatcttcctggcttttcttacttatattttatagtcatattgaaaaaaacatgttataatgaaagcgtttataaatattgaaggagtatttcaatgacttacacagaaaatcttcaaaaatggttagattttgagcagcttcctgactatcttcgtcaagaattactatcaatggatgaaaaaacaaaagaagatgctttttacacaaacttagaatttggtactgctggtatgcgtggttatattggtgctggtacaaatcgtattaatatttatgttgtccgtcaagcaaccgaaggattggcaaaattaatcgaaactaagggagaggaagctaaaaaacgtggtgtagccattgcctatgattcacgccacttctctccagaatttgcttttgagtctgcacaggtcttggcacagcatggaattaaatcttacgtatttgaagctcttcgtccaacaccagaactctcttttgctgttcgccatttaaatgcctatgctggtattatggttactgcaagccacaatccagcacctttcaatggttataaagtctatggacaagacggaggtcaactaccaccagctgatgctgatgcactaacagactttatccgtgctattgaaaatccatttgcagttgaacttgctgatttagatgaaagcaaatcatcgggccttattcaggttatcggtgaagatgttgatattgaatatcttagagaggttaaagatgttaatatcaatcaagatttaatcaataactttggaaaagacatgaaaattgtctatactcctctccacggaactggtgagatgttgacacgccgtgcccttgctcaagccggttttgaatctgttgttgtagtagaatcacaagctaaggcagatccagacttttctactgtcaaatctcctaaccctgaaagccaagctgcctttgctcttgctgaagaactcggacgagaagttgatgcagatgtcttagtagctactgatcctgatgcagaccgcctaggcgttgaaattcgccaaccagatggttcttataaaaacctttctggaaatcaaattggagcgattattgcgaaatacatcctggaagctcataaaacagcaggaacacttccagaaaatgctgctctcgctaaatcaatcgtatcaacagaattagtaacaaaaattgccgaaagttacggcgctacaatgtttaacgttttaactggatttaaattcatcgctgagaaaattcaagagtttgaagaaaaacataaccacacctatatgtttggttttgaagaaagcttcggatatcttattaaaccatttgtccgtgataaagacgctattcaagcagttcttttggttgctgagatcgcagcttattaccgttcgcgtggtttaacacttgcagatggtattgatgaaatttacaaagaatatggttattttgctgaaaaaacgatttcagtaacactttcaggtgtggatggagctgctgaaattaagaagattatggacaaattccgtgaaaatggtccaaaacaatttaacaatactgacattgtattattagaagatttccaaaaacaaaccgctactaaaaatgatggaacaatatctaacttaacaactcctccaagtaatgttttgaagtacacgttagctgatgattcatggattgcagttcgcccttcaggaactgaaccaaaaatcaagttctatattgccacggtcggtaatgatttagcagatgcagaaacaaaaatcgccaatattgaaaaagagattacaacatttgtaaattaataaaaaaagctaggaactgaactgcaccccaaaagttagacaaaaaatctaacgattggggtgcttttctgatgaaattaagttatgaagataaactagaaatatacgagttaagaaagatcgggatgtcctggtctcagattagtcaacgatatgatgttcgtatctcgaatcttaaatacatgataaaactcatggatcggtatggtgtagaaatcgtcgaaaaaggtagaaatgagtattatccacctgaattaaagcaggaaatgatagataaagtcttgattcatggttgttctcaactctctgtttctcttgattatgctctctctaattgttctatactcacaaattggctttcccaatttaagaaaaatggttatactattgttgagaaaacaagagggagaccgagtaaaatgggacgtaagcgtaagaaaacttgggaagaaatgacagagctcgagcgacttcaggaagaaaatgagcgcttgagaacggagaatgcctttctaaaaaagttgagggatttgcgcttgagggacgaagccttacagagcgaacggcagaaacaattagagaaatggtcacaggaggattccgactagacctcttacttgagataactaagatagctcgtgcaacttactattatcaactaaagaaactgaataaaccagataaagacaaagcaatcaaatctgacattcaatccatttatgatgaacatagaggaaactatggctatcgtcggatttatttagaactgcgaaatcgtggctttgtcatcaaccacaaaagggtgcaaggcttgatgaaaagtatgggcttgactgctcgtattcgtcgtaagcgcaagtatgcctcttacaaaggtgaggttggtaagaaggctgataacctgattcaacgccagtttgaggggtcgaagccctatgagaagtgctataccgatgtgacggagtttgctttacctgaagggaaactttatctatcgcctgttcttgatggctataacagtgagataattgattttaccctgtctcggtctcctgacttgaaacaggttcaaaccatgcttgagagggcttttcctgcggcttcatacagcgaaactattctccacagcgaccaaggctggcagtaccagcacaagtcctaccatcaatttctggaggacaaaggcattcgtccttctatgtcacggaaggggaacagtcctgacaacggtatgatggaatctttctttgggattctaaagtctgagatgttctatggcttggagaagtcttataaatcacttgatgaccttgagcaagctatcacagattacattttttactacaacaacaagcgaatcaaagcaaaactaaaaggacttagtcctgtgcaatacagaactaaatccttcacttaaaataaattgtccaacttttgggggtcagtacaaacttactcctagctttttttatatctatctaacgatattctattattttcaatcatgaaatataactgcaattaacttcacgatcaaataatagagcagacttacaattaaccacgttatcccaataactgcaactaaacctattaaaacagataataccgtattcttagttgctagttggttactgataaaccatgaaactgcagaaataaatatcagtaataatagttgaagcctttttttcatataattcctcttactacttttgtgcattttgcatttgataataaatacctttttgagccattaattcagagtggttacccacttctacaatttcaccagataccataactaaaataatatctgccgtttgaatggtagataagcgatgtgcaataataaagcttgttctccccttcatcaacatttggaatgcttcttgaacaagaacttcagtacgagtatctatagacgatgtcgcctcatctaatatcaatattctaggtaatttaagaaaaatacgagcaattgtcaatagctgacattgcccctgtgataacgaatctccagcatcttctaaatacgtatcatatccattcggtaattgtttgataaagaaatctgcattagctgcttttgcagcctctatcacttcttcacggctagctttaggattggcatatgcaatgttatcgtgaatcgtagcactttttaaccacgtttcttgtaataccattccaatttcttgccttaattgtgatggctcataatcagtaataggcttacaatctaaaaggatatttcccccgtcaacttcatagaaacgcattattaaattgattaaagtagacttcccagcacctgttggtcctacaatagcgaccttagctcctgctggaatgtgtaaattaataccattcaatagtagttttgatttattataaccaaaaacaacgtttttaaaatcgatttgacctttgaccgttgatgaatcaagtttttctgtacctgttatatttggtgacgattcttctaaaatagagtaaaggcgttctgcacacgccagagcactttgcatctcagacaggacggaagagatgtcattaaatggcttagtatattgattgacataatttaagaaagtgattaattgaccaacactaaaagcccctgacataatgcgaagggcaccaatcccagctaagaagccataaatcaaactattgataaatcgggttgatggattgacagttgaagaataaaaaattgctgattgagaaaagttagcatactcttgattaatagtcctaaaatgatcactactttcttcttgcgcactgaatgcttgaataaggctttcttgactcaccatctcttcaatgaattgagtttgtcgtcctcgtgatgccgtttgattttgatataagtgataactctttttagcaataaagcgggctagaaagagtgataaaggcgtcagaaataataccaaaaaaagcattaataaatcaatctttgccatactaaaaatagtaactataatagttaataaaccaacaaagaactggttaaaaaccattaataaaccatttgataattgctccgtatcggtagtcacacgactaatcaagtcacctatgccacgtttatcaaggtaagctataggcaatagattcaacttttccattacagcctttcttaaagaagcaacataatgaaaaattaagcggttatagagcagaggattaatccattgaataatagtatttgctaaaatgactgcaatcatcttccacattataggtaacaataatatcatagaatgaggcgataatacaacgtctaccgcttgtccaattagaacaggcaaataaacagtgaggcaaacttgtacaaccgtccctaataatgccattcctactaagctttttttagaaagaagatcttgaacaagctttttttgtatctttttaggatgacttgctttcatttactcctcctccttaaaattttgtgaatggtaaatggacttataaactttgttatgagctaataaagattgatgattatcaaaaccaacttgtttgcccttatcaaggagtaagattctatctgcattttgtatactattaattctctgtgatacaataataagattagtttggttgaaatgtttagttatagctttaaataaacgagcttctgttaaataatccaatgcagatgttgcatcgtctaaaatcaaaaatggtatcttatcttgaactaaagctcttgcaatcgtcaacctttgcctttgaccaccagagaaattcctaccaaaactctctacaggggcgtcaagttgaccatctttttcttttacaaaatcactagcttgtgctatttctaaagcagtccaaagtttttcctcactaactttaccaagtcccaaagaaaggttagaacgaatagttcctttaaacaactgagcattttgaggaacaactcttaccagggtacgccaatttgaaattgtatctggactttttccctgatgatatatatcaatatccccttcttgcactttataaatatgaagcaataaattaatcaaggttgatttcccagagccagtcccaccaattatccctaaagtttctcctacattcatagaaaaagtaatatcagataaagctttttcagaggagtttggataagaaaatgccatttcttgcacttctaaagccttattcgaatattttggctcaagtttgtcatcaattatttcagacggtctttcaaaaacggctataattcgcttagcactgatataactttggttcagtgatgtcaccaacattgtcatttttaacaattcaacaagaatttgcaataagtaattaattaaagcaaccaacattccttgtgataaaagatgattagctatatttaaattaccacgccaaataatcacaaccaaagtgatattaacaactagaaatgttagaggcgttactaaactagaaagcctacctgcttttaattgtaaattcgtataatgataattgatatcattaaatgcttcactctctctatctacttgattaaaggcacggataactcgtacaccttgaagttgttgcctagtcaactttaccaaataatcggttgaagttctgattttaaggtaaataggatttaatagtcgagacattacaaaaacaatgataaataacgtgacaaccattaccaagaaccaaatagtcaatgaggggctaatggaaaaagccataattatggcaccaaaaacaataatcggagccctcaaaaataaacgtaaaaattgatttaaaccagtttggatttgaaatgtatcagcagtcaaacgagtaatcaaactagcagttcccaattcatctctgtcttttttacccagtgacatgactttttggtagagatcctctgtcaattgtctcgtataaccaactgcggcttttgaagaataatattgagcagttatcgctactacaacacccaccgcagccaaaaagaaaatcaatccaatttgcaacagtaaaccacttctatcccctcgtggaatggtctcgtcaatcatttttgcaataacgattggtaccaaaagttcaaaagaggcttctaataatttgaaaaggggtccaaagatagtttctttgatataccccttaaaataataagttagtcttttcatacttacccttcttaaaacaactccattatttttatcaaataaaggttgaattgaacttcacgtgagtagtaaatattaccaccatttttatagagcttccctcctgaaattaaggcgagaggatgatagtaaaagtaagtgtccccgttataatttcctaggctgggagctacaacatttttagagtaatttttggccaactcaatggaattttcacccccatgatccgctacataatcaatataagaagaaccaaaattgtatgcttggacagcagtccatacatcaaccttagcttttttagcttgacttatattttgtgacaacagagtgacgccatgtttaatactggtgtggctatccgtaatactgttcgtagttccactgatactttcacttgattgcatcacatctatagcatctcccttagtttcagtataaatcatagataatactaagtgcacattagcctctgaaccattctctgcaagagtattctgcactaaatcatgatattgaagcacttttttaacattttcatggatgataactagacggtacccaatgaaaataataataattaatgctatcaaacgttttaaaaatttaaacatattatttattttgaatatcctgtatgtttttgattagtattgagtatgtaccatcagggttttggataaattcaactgattcggcatcttggtagacattgttgggtacaatcaattcaataccatttgaaagagatagcttctgattctctaacttcttaatttgacgggaatgatcaatatcacttacttgaacaggtccaggtattgcgtctttcaattcatcaacaaaagtcagcctggctgttaaattatcatcaaataattgatctgctaatttttctggagacaattcttgctcttcttctaaattcttataaatagccgatttcatttttgattggaaagaaaaatcatctttgttgaaattttcagcaattttttgagctgtctgttcaaccatttttatagattttttaacagactgttctggttgtacttgtaataaattttcagaaaaataattagcaaatgaaccattgtgtttgatacgcttttcaattaaatagtattgctttgatgacttgttaacaaccaaagcttcatctggagtttgagcagcacttggaaggttattctgtgttattgtaattggctgctcttgattttcagaaacatgagcaaattgttcctttaatgagattcgaaggaaagcaaaatgttccattccatccttgtcaaattgaataaaaactaagtcattcgttttttgatcttccgatatgacaaactcttctttccaaagttgcgcaatttgacaggaagaaacatataaatcatcttgtaaatgactcataaatacattatcctctccaaaatagccacgcttagcttcatcagaaaaaactttacttaattttttacgaaagtagtcatcaatccttggagttagggttagcggagtatctgatagcactaactctgtgtcgttaggagaaaactgatgtataataatctgtttgatataaaaatccatcataacattaattctcatacaaagggaaagcgtccgttaatgatttaatttcttgacgaacttctgtgaggacatcttgattttcatgatttttgagtgccttaatcattaattcagcgattcttcgagattcttcaactcccattcctcgactagtaattgctggagtaccaattcgaatacctgatgttttaaatggtgatagtcgctcaaacggtatagagttcttgttaagggtgatattgacttcttcaagaacattttgtgcctttttgccattctcaataacttttgtgacgtctactaagaacaaatgattatcagtaccatcagaaatcaaatgaaagtcatcatcttctttaaaaactttagccatggcttgagcatttttaataatatcctcaccgtatattttaaaggaaggatctagggcttctttcaaagctacagcttttgcagcaattacatgttctaatggtccaccttggagtcctggaaagactgcagaattaatttttttagcaattgcttcatcattggttaaaatcaaaccacctctaggtccacgtagagtcttatgtgttgtcgttgtcgttacatgagcataaggaataggactagggtgatgaccagaagcaactaaacctgcaatgtgagccatatcaaccattaagtaagcatctactgcgtctgctatttgacgaaatttttcaaaatcaataatgcgagaataagccgacgcccctgcaacaattaatttaggctgcgtttcctgtgctattttcaaaatgttatcatagtctagcatctccgtcttaggatcaacagagtaagaaacaaaatgataagtttttcctgagaagctaactgaagcgccatgtgttaagtgcccacctgctgctaagtccatccctaagacagtatctcccggctcgattaaagccatgtaagctgctgcattagcctgactaccagaatgtggttgaacattagcaaactcagcattaaataacgtcttagctcgttctatagctaaactttcaactacatcaacacaatctgttcctccataataacgatgactaggatacccttcggcatatttatttgtcaaaacagaaccttgtgctgccataacagcttttgaaacaacgttttctgatgcaattaattcaatattattttgttggcgaatttcctcatcatgaatagcctgccaaagttcttggtcaaattctttaaaattgtctttatcaaaaatcattttttactccttaagctcgttataacttttaaataatggtttcaatcattatatttatcacatttttactattagttgcaagatgattaaattaattttcaaaaattaattcaggtatcgtagccgttagtacctcttgcgtgattgcaccttgccttaaaatcttaactctatcaccagacaaatcaataatagtagaatccacacctgtcaatgctttatcatcttcaatacctaaaacttgatgattaaactgtttttgaatttctgagaacacacgaccactatcacatccagaaatattagcagaaggaccaatcagtggaccatggttagcaatcatatcaagggttacagggtgtttaggcatccgaaatcctacgcttaataacccagaattgatccaatgcggaacttcttgtgaagcttccaaaataatggttagcggtcctggtaaaaaagcatcgtacaattgctttaaataggtcggttgatttttagaatattttaaaatagtctcaaaatcacatatatttaagttcatagccttatcacgaggcctttttttaagctcatagacgtggttcacagcttcttcactcaaagctttggcaaaaattccgtagactgtttctgttggcataataactgcgccatgatcctctaaaatctgtcccaaatcattcattatctaataccaccattctatctttaccaaatatatctttcaaaactctgcaacgattgtttggaaaatatcttttcaataaacttcgtaaatcatcaccttgtttgtaacctatttcaaaatataatttacctctaggttgcaaatattctcttgagttttcaatgattttacgataaatagctaatccttcttcgtctgcaaaaagggcactatgaggctctgaagctagcacattcttccccacctcgtctttgtcattgtaagaaatatagggaggattagacacaataatatcaaatttacctgaaatgttactaaagacatctgattctataaaagtcacttccgcatcacaattattagcattttcctttgccaagtctaatgcagatacagaaatgtcactagctagaacatcccaagaggggcgttctttttttagagaaatggcaattgctccactacctgtaccaatatctaaaacagaacaatcttctactttattctctgataagattagatcaaccaactcctctgtttcaggcctcggaattaaaactcgttcatcaacaaagaaaataaggtctctaaagtaagctttacctgtaatatactgcggtgatctatgttttttaagctgttgaaaaatattttccattaattgctgatcagtatcactcacactactattttgatttaaaaggtaatcagttgttgaccattgttttaggtcttttaatacataaataaaattttcgacttcttcaccacaagcttctaataactgtccgtaatgcttgattaactgcgcataattcattatttatttaaggcttctaacttttgagtctgatcatacataacgagtgcatcaataacttcatccatttttccagataaaatagtatctaatttttgaagtgtcaaaccaatacgatgatctgttacacgattttgtgggaaattataagtacgaatacgttctgaacgatcaccagtaccaactgttgatttacgttcagcatcttgttcatcttgagcaatttgcgcaaaatggtcagcaacacgagcacgaatgatcttcatcgctttatcacggtttttttgctgagtacgttcttcttgcatttcaactttgattcctgtaggaatgtgtaccatacgaactgcagtagcaactttattgacgttctgaccaccagcaccagacgcgtggtaaatatcgacgcgaaggtctttttgatcaatttcgtattctacttcttcaacttctggcattaccaaaacagttgcagttgaagtatgaacacgaccctgactctctgtcaccgggacacgttgaacacgatgagctcctgattcatatttaagcttagaataaactgactgaccagaaaccatagcaaccacttctttaataccaccaacaccattaacggatgattccataacttcaaaacgccatccttgagtttcagcatatttttgatacattgttaaaagatcaccagcaaaaagcgctgcttcatcgccaccagcagcaccacgaatttctaaaataatgtttttatcatcgttaggatctttaggtaatagaaggatttttaatctttcttcatactcttctttagctgcttttgattctttaagttcttctttagccatttcttccaattcagcatcaccagaagcatctttgatcatttcttcagcatctgaaatattttgaatgacttgcttatattctctataagctgtgacagtttctcgagtactagcttcttcacgtgataattccataaatcgctttgtatctgaaacaacatctggatcactaagtaactcacctaactcttcataacgatcttcaactgcctgcaattgatcataaatattcatttttctttgtatctcctttaaaaccgattaccttttaaatatctggattaaaataatgttttcgacaaactgggatatatgtttcattaccaccaatttgtatctgatcaccttcatagacaggttttccgttttctgtccttaaaaccatggttgctttcttactacagtattggcaaattgttttgatttcatcaatcttatcggccaataatagcaaatgttttgaaccttcaaaaagattgttttggaaatcatttttcaaaccaaaagccatgactggtacatctaagtcatctactactctagctaaatcgtagacgtttttcttactcaaaaattgacattcatcaattaaaacacaataaggcttttgtggtaaattctgaatataggagaaaatgtccatatcatctgaaattggaactgcttcacgacgcattccaatacgacttgaaacgactccaaattcatctcgagtgtccaaggcgcttgtcataataaccacaggttttccttgttcttcatagttatgagcaacttttaaaatttcaatggttttaccagaattcattgtcccatatttataatagagttgagccaaagcggaaaatcctactttctatagtattctacctattttaccacaaaggctgaagttttcccagccattgaaaacagtgtgtactttttcacaacattatgttacaatgatgcccaataacataaaggagtaacattatgccatttgtaaaaattgacttgtttgagggacgctcacaagaacaaaaaaatgaattagctcgcgaggttactgaagtagtatcacgcattgcaaaagcacctaaagaaaatatccatgtttttatcaacgatatgcctgaaggaacctactatcctcaaggtgaacttaagaaaaaataagaaatagtaaaagaggttacccaggtaacctcttttgatagtctttgtaagcatatttcttgacaaattgaaaatatttgaaaataagtgttgattttcaagttagaaaacggtatcattagaatatattgctttggaggtggaaaatttgcaactttctcatagtttaagactcatgggaacgactatcgatattcaaattaattctaaaaatgctcaaaaacaaatccgagaggtcatagaactcttggagctctacaaaaatcgctttagtgcaaatgactttaattcagagttaatggctataaataacaacgctggtatcaagcctattcaagtacatccagacctctttgaattaatcacaattgggaaagaacacagcttagctaggcctagtaacctaaatattgctattggtcctttagtgcaaacttggagaattggattttcagatgctaaactacctagccctagtgaaatatcagaagctatgattttatctgacccaactcatatacttctagattcaaataaacaatctgtttttttaaatcagataggaatgaaaattgatttgggtgcacttgcaaaaggatatatcgctgacaaaattatgacctatctcaaaaatgagatgattgattctgctattattaatttaggcggaaacgttttagttcacggagataatcctaatcgttcagaagggtattgggttatcggcattcaacatccgaaaaagaaacggggaaaaaatattggaactgtcaaaattaaaaaccaatctgttgtaacctcaggtacttatgaacgccgtctgattattgacgataaggaataccatcatatttttgatcgacagactggttatccgatacaaacagagatggctagcatttctattgtttctaaacaatccgtcgactgtgaaatctggaccacaaggttgttcggcttatccattaaagaggctcttgatattttaaacgctgtttcctacattgaaggcattatcatcactaaagatgatcgtatctatttatctgatggcttaaaacatcattttcaactattttatcattaagaaagaggatttctaatatgaaacttattggaatcgttggaactaactcaaataaatcaacaaatcgtcaattattacaatacatgcaacaacactttgctgacaaagcagaaattgaactcatcgaagttaaagaccttccgttatttaataaacctgctgataaaaatgttccccaagtaattttggatattgctgctaaaattgaagaaactgatggtgttattattggtacgccagaatatgatcattctataccttcggccttaatgagtgttttagcttggctatcatatggtatttacccacttctcaacaaacccgttatgattactggtgcttcatatggaacacttggatcatcacgtgcacaattacaattacgtcaaatacttaacgctcctgaactaaaagcaagtgttttacctgacgaattcttgttatcacactctctccaagcctttgataaagatggcaacctacacgatatcgaaacaagtcagaagctagatgctatctttgatgattttcgtctttttgttaagattactggtaaattatcaaatgctcgtgatttacttcaaaaagaagcagaaaattttgactgggaaagtttataagagtatagaagggaataactaagatgaaatttgtaggtattgttggctcaaatgcagagcaatcatataatcgtatgttgcttgaatttattcgcaagaattttaaaaccaaatttgaattggaagtccttgaaatcgatgatattccaatgtttaatcaagaccaaaattgggaagaaagtttccaacttcgtcttcttaataataagattacacgagctgatggcgttattattgctactcctgaacataatcatactattacagccgctcttaaaagtgtgcttgagtggctctcatttgctgtgcatccactcgaaaataaacctgttatgattgtcggtgcttcatattatgatcaaggcacatcacgtgctcaaatacaccttcgtaaaatccttgatgctcctggcgttaatgcttacacacttccaggaaatgaattcttattaggaaaagctaaagaagcctttgacgataatggaaacattatcaatcctgggactgttcaatttttagaaacttgtcttgataattttatcaaatatgtaggagttgtatcatcattgagaaaacctaaagctattgaatctgaagacctctactgtcagggacaaattgatacaaccattactggtatcgacccagatgatcctgattggttagacaaggcagctgagaaagttaacgccgttgaaggggatgcttacgttaaactagacaatggtttacttactgttaaccaacttaatatgtttttaaatgctatgccatttgagctaacatatgcagatgataataatcaatttctatattacaataataatcatccagatccagatacaatgttaggaaaacgtgttcgtgaacaagtaggaaaccgtatggctacagttcatggtagtttaccaccggcacgaatgaaaaatgttgaatgggttatcggtactcttcgtaatggaaatcaagaatatgtacgtacagtcgttcctggtacacctccagaagttatcaatactcacaactatcaagctatgtactacccagacggatcttatgctggtattaatgaaattatctttaactttaaaccgtggttagattggtacctccaaactactggacaacgtttggtcggtggaactactgctgctcctggagcttcagcagttgacgctacttctagcgcttcaactagcacaggggatgctcccgtggatcaagccacagatgccacttctggtgcctctgaacattaatctcctcgcttttgaggatctgataccttaaaaagatatcaagatcctcctttttaatatttaatcaagttaataaaatcacataaaaggaatatactatgtcactttttcaagaaaaaattgcttacaattgcgctaaaaaggaagcgctttataaagagagtttaggacgctacgccttgaggtcaatgctagctggggcttatttaacaatgagtactgctgctggtatcgtcgcagctgatactattggtaaaatctctcctgctctatcaggttttgtatttgctttcatctttagttttggacttatttatgttttaatatttaatggtgaattggcgacatctaatatgctttatctcactgcaggagcctataataaaaatatctcttggaaaaaagccatgacaattttaatttattgtacttttttcaacctcgttggtgcttgtatattagcttggttgtttaatcaatcgtactcattccagcatttaacaaatgatagctttttagggcatgtcgttgctaaaaagttaggaaaacctagttcaggagctttcctagaaggtattattgctaatatgtttgtgaatttagctatccttgcttacatgttattaaaagaagaatcggcaaaaatgacggttattttatctgctatttttatgtttgtttttctatcaaacgaacacttaattgctaattttgcatcctttatgttagctgcttttagccatatcgaacatattaaaggttttactcttctaaacattatccgccaatggacacttgtattctttggtaactggataggagggggcgttttcatcggcctagcctatgcttggttaaataaaacaaaaacttctcaccatgaataaaagaaaaactgagtaataaattactcagtttttcttttatattctcatcatgaaatcaataactaaaaattaacttttttgataaataaaggaaagtatcatattaattttttaggcaatccattcaaaatgatatttaaaacaacagctgtcagggttgagataacaataccatttgtcaaaaacatttgtaaagtattaggaagactaatgaagagatttgtcccattaaaacctactcctgctgcaattgatacggctgcaatgataaagttatgctcattatgctcaaaatcaacctgattaagcattttcatcccttgaagtgctaccataccaaataaaactaacatggcaccaccaagaactggacttggaatcatttgagccattgcgccaaatttaggtaacaagccaagtataactaagaagagagctgtaaaatatatcggcttacgcgtacgtatcccagatatctgtaccagtcccacattttgagaaaaaccggtatatggaaaggtattaaataagccgccaagtaatactgccaatccttctgaacggtaaccattacgaagtctcttactgtctaatttatcgtttgtaatatctgaaagcgcaaggtaaacacctgttgattctaccatagaaactgttgcaataatacacatcattaaaatagaagtaaattcaaatctaggagctccaaaataaaatggcttcggaatatgtacaagtggtgcatctgctaccacagaagcatcaactaagcccataaatgctgcaagaattgtacctgaaatgagcccaataaggattgaaattgacttcaaaaagccttttgcgaaaatattaattaataaaacaacaccaatcgttaccagtgataaagttaaagattgtaagcttggctcttttgcattatcacccatatttcccatcgcaactggtattaatgtcaaaccaattgtagtaataactgatcctgttacaattggaggaaagaaatttgcaactttagaaaaaatgccagcaactaaaacgacatatattcctgaagcaattaaagctccaaacatatagccagaaccttgttgtgcaccaataattgataaaggagctacagactgaaaggcacaccctaatacaactggaagacccactccaaagtgcttacttaatcgtaattgtaataaggtggcaatcccacacataaaaatatctgtcgcaataagataagttagttgcttagcattataaccaagagcactagcaatcatgataggtacaagaatggatcctgcatacatagctaacaggtgttgcaagcctagaagtgctgcttgcgaattactttgcacattaaatttcattaagcatcagcctccgcaaaaacaactcgaccattttcaaacgctttaatacgggcaagagaagtaactggaacacctgttttttctaacaaatcacgcccatcttggaaagatttttcaataacgattccgataccagcaaccttagctccagcttgaccaataatttcaagtaatcctttagccgcttgaccgtttgctaaaaagtcatcaatgatgagtacagtatcatcgttagataaaaagcgactcacaatagaaacttgactcgtaacttgctttgtaaaagaatacacttcagcagttaagataccttcagtcatagtaatgttcttagcttttttagcaaatatcattggtacgcccaatgcttgagctgcgtacactgctggcgcaattccagatgcttcaattgtaacaaccttcgtaatgccggcttctttatatttatcagcaaaaactttacctatttcctgcattaactcaaaatctacctgatgagtcaaaaaagaatcaacttttaaaatgttctcacctaaaacatcaccatctttaagaatacgttcttccaataacttcataataaccccttcactctttagaaaataaaaaaataacttacctcaatcagaggacacaaatctcctctaatttatcgcttcattaacatgaaccaacaaggcaagctatttattagcttacttattgttagacattacggtgtcttgtagagacgctaagccaatcctcagcataaataagtaaatcatatatttaattgttatgtatgatagataactattgtaacatttttaattaagatttcaagatttaatttaaatggaatcaccattccaaatagaatttttaacaataacgtaatcaacgtgtctcaagctatccaattcttttcctcctgcgtaagaaatagaactttgcaaatcttgttgcatttctgtcaaagtatcctctagtcgccctttaacaggtaatagaattttcttaccttcaacatttttatgttctcccttttgatattcagaagctgagccatagtattctttaaattgctgtccttctacttccacaagttttccaggactttcaaggtgaccagcaaacagcgaaccaatcattaccatactagcaccaaagcggatagattttgcaatatccccatgtgttcgaataccaccatcagcaataattggcttgcgagcagctttagaacaccaacgtaaggcagctaattgccaacctccagtaccaaaacctgtcttgactttagtaatacaaactttaccaggtccaataccaactttagttgcatctgcacctgcattttccaattctctaacagcttcaggcgttcctacatttccagcaataacgaaagtttctggaagctcttgtttaatgtgttggatcatctctataacactgttagaatggccatgtgcaatatcaatagtgataaactcaggagcatcttctttcagacttgtcacgaagtcatattcatagtctttgaccccaaccgaaatcgatgcaattaaacctttatcatgcatacgcttgataaaaggttttctttcttcttcattaaaacggtgcataatataaaaataaccttcacacgctaatgtttcagctacctcttcatcaataatagtctgcatattagcagggattactggaagtttaaaggtatagtttccaagtttgacacttgtgtcagcttgtgagcggctagatataatacacttgtttggtattaattgaatatcttcataatcaaaaacaggaatatcgttaaacataatggttctcctaatgagtaaaatgaccttcctataactttgtataacaaagcatcgctaggtaaaaacatacctttcctttttaaattatagactttatttatttttagtcaatttttgatcaatttatttgaataatgttcgttttttttaaaataaatgtaaaatcctatagagcagtactctataggattttacatttattatattgcttttctttttcgaagataagttaatcctacaatagctaagataacaacaacgataacgaatagaactgcaaattgactaccaattatagctccatttttcggaatagctacttgtccgatggtaaaaatttgtgaggctactgcggttgcaaaagctcccgcaaattgttgtagtgtattcaagatactattaccatccgctgactgtgctggctttagttttgttaaagctgtcgtaaccatattacttgctccaatccccataccaattttagtaaggatatcaaaggctaaaagtactacaacagacttcgcaggaatgaatatagctgtaccaattaaacctatcaaagaaagggagatgcctatcataattggcttaaatgcaccaattttatccaggagataacctgcaaaaggggataaaaaaactactgctattgcacctggaaacataaacaaaccagctttggttgaagtttgatgtaaaacaagttgcaagaggttaggtaataagaacgaaagtgctagaggaatcatttgaaaagccaggacgccatacaataagattgagaaatctttatctttaaaaacattcaaattcaaaaattctagctgtttatttaaatagtaaaaaataacaaaactaacaatagctactaataagtaaaaaatagacatcttttcaatagctaaaagaagggttgccaagccaatacctaaactgataaaggcaggaaaattgagtttatcattaattcttacttgacgtttgggaatagaagccaaacctataaaggtggatatgataagtattggtgccagaagcataaaaatcatcttccatcctaacattcctgaaataacaccgccataagtaggtccaactgccggtgctaaaagtgtgaccatagcagctactcccatcattagtcctctacgctccatcgggatttgtgtaagaatgatatgaaacaataaagggagggctaatcctgtcccaacaccttgcaaaactctccctactaacaatatagctaaattaggggcaaagctatcaattaaaacaccagataaaaaaagcacatttgccaatgtaaaaatttgtctctctgataaatttttaatcataaatgctgacaaaggcacagtcacagcaacagctaacaaatttcctgttgtcacccattgaataacagcggggttaaccccaaattctttcatcaaaagcggaaaagtgacattcatagatgtttcaataagaatccctgaaaaacctaatatagccgttgtaattatggcaggcataatacgccatccctttttagtcattaaaatctccttgctttgattattatcataaaatagagcaccccgctaaatcaaggtgctccatttaattcattcgaattaaaattaaattgtttatattagttgtcaaaggacaatcaacagctcttattatatcaaataaagctaagaaaaacaaagagttttttgaatattaatgtcttcactttcttatctattctctactcatcaatcaccacttcagagaacataacaattgcaatttactcttaataccgttatcatgttcatatgctaatacccaagaaaatagtggcttttgcctcaaatgaatctgaaaataatttctttattacgttaaagacttactttaattatttattttctatacaaatcattacagatatttcaactctcaatcatgcagattttgacggtagctttgcattccatgatatagaaactagcatacctcatctggtaattgactccaactacttagcgattagtcagactaactcaaaaatagaggctaacgatattaaaacgttctcggaactctccaaaacaatgaccgagtttcactatatgctaaattttgacttatttaaccatctcccatatcgttttagattgcataataaggacggtcaaacaatttattcgaaccataaacctgaagatccttttgatatttatcctgaagaagaatatcctatagacaaatgggttcaaaacagcctaatagagaaaaaagcgaaagagctacatttactcttacctagcgcatcacaagattatattctagtacaatcttataaacgcttagaaaatgatagtgggcaactagttggttatattgaacatgttcataatattaaaccactgctagagggttatttaaaagaatccggtcaagctatcgttggatggtctgatgtcacgtctggtgcttctatctctaacgatgattttgaactataatccactcgtcactctaaaaagaaaactaataactaaaaggcactggtttaatttcagcgccttttattaatcaatctccagttgttgtaagttcacttttttctttaattggtagacctcgattagctgtaaaaatcaaaggaactacttctgttgtaacttcggaaaattgtagaccaaaccatcgtattggtgttgctgtccaatgctttatagatgatttcattagcataacaaatcgttcaccaggttttaggttttgactacttgagaaacgttcatcaaggacaataaacctaaaatctcctacgttactatcaggtctaacgctgtatgtctttccttgtttaggcagacgtccactttcaagtaattcttctacaatcgtacgaagatagcgtgacacagtctgacgcatcttaaatccaaggtaaagttctaccttcacaatgaagtctgttcccatcatgtcaactttatactcagctgtataaggttcatcagtgaccttaatgtttacaaaccaataaacttgtgcttttttagggcgcttatcaaggatagaatacatgatagacttatcaatcatgtcttcttccatacgatttgtcaaataaacaacgttagtatgataaatcggataacgatgatcatgtctaagtttatctaattgtccgatgtaatcttttaaatccaacaacttaacataacgcgaaacaattttactacctttataccagatagtcatgatgaatataattgctactgctataataacaacaacatagcctccatgcataaatttaacagctgaagcaaggaagaagattccctctaaaataccaaagaaaatcatcatcaataagactaaacctctttttactcctttttgaattaaaaagaaagacagtaaaatagttgtcattagcatcgtaattgttatcgctaatccatatgctgcttccatgtgcgctgaagtcttaaaaagcaaaacaatagaggttgtaatggcaaataagaaccaattaataacaggtatgtaggtttgaccaatattgtcaccaggataagttgaacgaaattgcgggaatatttttagtcgcatagcttcagaaactaaggtaaatgatccagaaatcagtgcctgtgaagcgatgatagctgccaaagtagctaaaataacgacatgcattgtaaattgcgaagggatactagcaaaaaagggattcaattcatttcctgcgttcttattagctaaaatccatgccccttgcccacaataagaaagtataatggcaaccttaacgaacggccatgaaacatgtatatttccacgcccaacatgacctaagtcagagtatagtgcttctgcccccgttgtcgccaggaaaatagatcctaaaataaaaatacctttatgattctctggactaaataacaatttcaaaccgtagtatggattaattgctttgaaaacttctggatgggcaaaactattaaggagaccgctaatacctaaaaaggcaaaccatataaacataattggcccaaataatttcccaatcacacccgttccaaacctttggatggcaaaaagtaacagtaaaataaacaaggtcgcaaaaataacgttactctgattctggaaaatatgctgcaaactaggaactacttttaatccctcaacggctgaagttacggttacagctggcgtcaaagctccatctgacaacaaggttgcacctccaataacagctggcacaattaaccaaggtgtcatttttcgaacaagggtatataaagaaaaaataccaccttcgtggtgattatccgcctttaaagctacaagcacatacttgatagttgtaataagtgtcagagtccatatgattaaagatatagaacctaagataaacgattctgtaacactagaaataccaccttggttttcaaccaatgattgcattgtatagagtgggcttgtaccaatatctccataaacaatgcctaaagcaataataaatcctgcttttgatgctttatcaaaagaagaatgattgacatgttgcatttctgccaaccctccgattaaataatattagtcaaaaaaatggctgaactcattatagcagattaagttaaaaaaacaacacttatctataaaaagaccagaaattattaaagcgtttcctggtctttactattttaatcacgataaacaggttgaggtccataagtttgactgactggcattatttctatgcgattaatattaatgtgttctggttggctagcaacccatgacacggtattagcaatatcctctgcttgaattgcatgcgcaccttcataaagtttttcaactcttttatgatcccctttgaaacgtacagttgaaaattctgtcccttcacataaaccgggttctaggttagtcactctgattttagttccagctaaatcggcacgcaagttgagagaaaattgttttacaaaagcttttgatgcgccatagacattagctcctggataaggaattgttcctgcagttgatcccaaattgataattaaccctctattaacttctaccattttaggtaaaatgcatcgtgtcaagtaaattaatcctacaacgttagtattaatcatagtcatccaatctccaaaatcagcttcatatgatttatccaatccaagtgctaaacctgcattattaaccaacaaatcaattgattgcaattttttaggcagactttctaaagctttgtcaaccgattctctacttgtaatatccagttgaagtggataaaagtgaccctctgaaaacttttctccaaggcattttaatttatccattcgacgagcacaaccaataacgctataaccatctgaaactaatttagtaacaatagctgcaccaaaaccagcagatgccccccgtcacaagcgcaactttacgtgatatcatagacactcctcctctagtatatagaaaaacgagctaggaaaaatccttctcgttttataaattattttgatttctcatcaatagcttgagcagctgtaatgatagcaagtttataaatatcttcagcacttgatccacgtgataaatcatttactggagcattcaatccttgtaaaatcggtccgattgcttcaaacatacccaaacgttgtgcaattttatagccaatatttcctgattgaaggtctgggaaaataaaaacatttgcttttccagcaacatcactattaggagctttaatttctgcagtttccggaacaaaagctgcatcaaattgtaattctccatcaacagctaattcgggagataaatctttggcaattttagctgcttcttgaactttttcagcttgaggcgcttttgcacttccttttgttgaaaaactaagcatagcaatcttgggatcaatatcaaatattttagctgtatccgcagtatttactgcaatttctgctagctcttgtgcattaggatcaatgttaatagcacagtcagcaaaaatataacgttcctgtgtattttcacggttcatcaagaatacacctgaagtgcgtgaaattcctggttttgttttaataatttgaagagcaggacgtacagtatcagctgttgaatgaatggcccctgataccataccatctgccaaaccaagttttactaacataaccccaaaatagttaacatccttcaaaagacgatctgcatcttccatagtagctttgcctttacgaatctcaacaaaagcttctttcatctcttcaaatttttcgtattgttcagggtcaataatgctataatcttgatcaacaaaaccaagtcttgccaaagaatcgtgaacttcgtcagccttacctaaaataacaggatcaacaagaccttcaaatttcaaacgagctgctgcacgtaatacacgttcatcgcttccctcagggaaaacaatcttaacataatcacttgcaactttttctcttaaaccaccaaataaggaacgcatatatataaaaccttctatttctaaattaatgtaattccatgataacgctgtcaaagtcatctgtcaagtctagcgtctgtttatttatttttcccataaaagggtcgtaaaaagacaaagaatgacaatgcaatgcttgcctgtttattcctagatccatacgtcctccgtacaaatcatctcccaaaagaggaaagccgatatgagcaaagtgaactctaatttgatgagtacgccctgtatgtaatttgatatccactaatctaacatcaccataacgagcaactacttgataactagtatgtgcatatttgcctgattcatggacgcgcctcgtaataatactatcaacatctcgtgcaataggagctataatatcaccactatctgctaaatcaccactccctgatactaatgcataataccttttttcaattgctttagcctgaagttgtttatctagacgagcatgggcataaccatgcttggcgaataacattaatccacttgtatctcgatccaaccgggtcacaatatggacctgctgattggcatagttattagacacataatagtgttttataaaattagcaattgtatttgaatgaatagagctaggaatactagcgaaaccaaaaggtttatttaaaatcaaaaaatgatcatcctcataaataatatctaaatcgtgaggcactggttccaaagtttcgtgagaaggctcgtcaggaatatctattgtaacaacatcgccaatctctaataagaaaatagcgttctgctcttcaccattaacaaaaatcttaccacctctgtacttaatctttgctaataacccccttgaaacatcatgacttttcaaaagtgttttaactttgcacctttcttttgctacgtattcaaatttcaatgttcaggttctccgataaaagcatcgttaacacgttcccaaaaactagtgtgacttggagttgaaacaaagttaatacttttttcgtcaatactatattctattttggtaacattcttgtaatggactgttttgttatctatagaaattgtatagacaccaactcgtttaggaactatctctatagcatcttttttggggatgataaccgatgaccccaaggtacgatagacgcgattattaagactagaaatttctgttagttgcaaggcttctatcgttgggtggagtactgccccccctagtgatttattgtaagcagtactaccggttggtgtagaaactaaaatgccatctcccctaaacctttcaaataccacttgattaataacaacatccgctaccattgttttttcaatacgcttaatagtagactcatttaaagcacgcgcacgaataactcgaccatcttcaagggtaatagttactttcaaaatgggataggagatttgttcacctttatcatttttcaaattattaattaatgtgtcaacttcaaaatctcgatagtctgtataaaaccctaaatgtcctgtatgaacaccgacaaaccttactttatccagttgtttttcgtacatgtggaaggctgacaaaagcataccatctccaccaatagaaatgacaatatcaggatccttttttgataaataaaaatcaggatcatgtttaaaagcagcaaagagctttgaggctacacgcttgctttgatatttcccgttagcaattatagcaacacgtgttgctctatctgtaaaattcatctgtgtcatcactatttcctacaccatcgctcaattttcgatttaaaggatcaaataaaagctgtgcttcacgaatatcttcgcgaatcttacgcatttcttcatccaattctaaagcgatttttgctgttttctccagtctttgtttaatttcttcagggaagtccccctgatacttgtaatttaatgaatgttcgatggttgcccaaaaattcatagccagagttctgatttgtatttctgctaaaactttcttttgtccatctattgtgtctacaggatactctacaacgacatgatatgaacgatatccactagatttcatatgggtaatataatctcgctcctgaaccactgtcatgtcatgacgttttctcaataaagcaaggacttcatcaacgtcatctacaaattgtaccatgatacgaagccctgcaatatcttgcaagtcctgagcaagattttcttctgaaataccacgtaaaaccatcttttcttgaatactttcaaccgactttacgcgtccagtaacaaattctattggagagtgacgattttgctttctaaattgtttacgaataccacgaagctttatttttaattcaccaaccgtttgaatataagggtctagaaatgtttcccaatccattgacattctaatcctccaaaatatttaatgtactctcttgtaaaataaactttttttctataaaattaacacaacaattaatattataccatatttaggaaaaggaagtgataagatgacacacctagaaattgaatacaaaactctattgaataaagacgaatttaatcgtctaacaagcttattttctcatgttcaacctattactcaaaccaattactattttgacacagaaacatttgaaatgaaagcacaccgaatgtcacttcgtattagaacgttacctaaccgtgccgaactaacactaaaaatccctagagaagtgggaaatttagaacacaatcatgaccttactttagaagaagctaaatatatcgttaaaaatggccaattccctgaagatactgagattgcttctttaatccttgaaaagggagttgatccaaccaaattagctgtctttggacaacttacaacaacaagacgagagatggaaacttcaatcggcttaatggctctagacagcaatatatatgctgatattaaagattatgaacttgagttagaagtcaaacaacctaaacaagggaaaagagatttcgaccagtttttaaaagaaaataatattaattttaaatacgccaaaagtaaggtggctagattctctgctactttaaaaaataactaacgttgagagattggattttccaatctcttttataattctcatttaagcaagaacttaaaatctcatactatctatcctcaacattgttattgcaagcattttcatgtttcttatcgtgaattttttctatttttttggtaaactattagtatcaatctaaaggagtcatctatctcatggcagaacaatacgccgataaacaaatcaaacttttctcattaaccgctaatagagaaattgctgaaaaaatttcccaagcttcaggaattcctttgggtaagatgtcatcacgtcaattctctgatggcgaaattatgattaatattgaggaaacggtgcgcggtgacgatatctatatcatccaatctacaagcttcccagtcaatgataatctctgggaattactcattatgattgacgcttgcaaacgtgcaagtgctaatactgttaacatcgtagtcccttattttggatactctcgtcaggaccgcatcgctgcatctcgtgaacctattactgcaaaattggtcgctaatatgttagttaaagctggagttgatcgagttcttaccctcgacttacatgcagtgcaagtacaagggttcttcgatatcccagttgacaatctttttactgtcccactatttgctgaacactataatcaactcggtctctctggtgaagatgtcgtcgttgttagtcctaaaaattctggaatcaagcgtgctcgtagtttggcagaataccttgactctccaattgctatcattgattatgcacaagatgattctgaacgtgaagaaggctatattattggtgaggtagaaggtaagaaagctattattattgatgatattttaaatacaggaaaaacctttgccgaagctgcaaaaattttagaacgtggtggagcaactgagatttatgctgttgctagtcatgggctttttgctggcggcgcagctgatattttagagtctgcaccaattagagaaattatcgtaacagactctgttttatctaaagagcgtattcctagcaatattaaatatctgacagctagccatctcattgcagatgctattatccgtatccatgaaagaaaacctctaagtccattattttcatatcgttcagataagaaggattaattgatgatttatttagacaatgctgctactaccgctctaaccccatctgttattgagaaaatgaccaatgtcatgacaagtaactatggtaatccatctagtatacatacctttgggcgtcaagcaaatcaacttttacgtgaatgtcgacaaattattgctgaatatctaaatgttaattcacgtgaaattattttcacttctgggggaactgagagcaacaatacagctatcaaagggtatgctcttgcaaatcagctaaaaggtaaacatattattacctctgaaattgaacatcattcagtcctacatactatgacttacttatcagagcgatttggttttgatattacttacttaaaaccaaatcatggacaaataactgcaaaagacgtgcaagaagctttacgagatgatactattatggtatctctcatgtttgttaataatgaaaccggggactttttaccaattcaagagattggtcagcttctcaggaaccaccaagctgtttttcacgttgatgccgttcaagtctttagcaaaatggaacttgatcctcattctttaggaattgactttttagctgcttctgcccataaatttcacggtccaaaaggtgttgggatactttactgtgctccccatcactttgatagtctacttcatggtggagaccaagaggaaaaaagacgtgcttcaactgaaaatataattggtattgctggaatgtctcaagctcttactgatgctacgactaacacccttaaaaattggactcacattagtcagctgagaacgacctttttagatgctatttcagaccttgacttctatcttaataacggtcaagactgcttacctcatgtacttaatataggttttcctggacagaataatggcttgttattgacacaattagatttagctggattcgcagtttcaacaggttctgcatgtactgcaggaacagtcgaacctagccatgtcttaacaagcttgtacggagccaactcaccacgtctaaatgaatcaatacgtattagtttttcagaactaaatacccaagaagaaattcttgaattagctaaaaccttaagaaaaattataggagattaatatggcatttgaaaaagaaataaatcttccagactgcaattacatttacactatcagcccgaacattaaaaaatataccttacgcgatactacattcactcaaaatcgcttaggtaattatgaattagagcgtctcctagaaacagtgcctaattctggcgatggctttcctctaaagattacaatcaataaagaactttctggttttaagctcttaattactgataaatctggccttagaatagtaaatatctttaaatctaccgatcataaaattcttcaagacaaattttatttcttaatggacagcctcgttgagcgtgatatctttacgaaaaccacaaaataatttatcgaccactatttttaacattttagtggtctttttgcgaaccattttgttgtcactttcacaatctttttgtacaatagagatgtgaagaattaagttatataactgattctaaatcgaataataaaatttttaacaaggagataattttgtgattatggataagtctattcctaaagcaactgctaaacgtttatcactgtactaccgtatttttaaacgttttaatactgatggcatcgaaaaagctagttccaaacaaattgcagatgccctaggtatcgattctgctactgttcgacgtgatttttcttattttggtgaactaggacgccgtggttttggttatgatgtcaaaaaacttatgaacttctttgcagaaatattgaacgatcattctacaacaaatgttatgttggtggggtgtggaaatatcggtagagctctcttgcattatcgtttccacgatcgcaataaaatgcaaatttcaatggcttttgatttagatagcaatgatttagttggtaaaacaaccgaagatggcattcctgtctacggtatttcgactatcaatgaccatttaatagatagtgatattgaaactgctatcctaacagtacctagtacagaagcccaagaagttgctgacatcttagtcaaagcaggtataaaaggcatcttgagtttttctccagttcatttaacattaccaaaagatatcattgttcagtatgtagatttaacaagcgaattacaaactttactttatttcatgaaccagcagcaataaatagttcattatttataaaatatctgcttcttctcgaaaactataatatttattttttccaacgatgatgtgatctaggcagacaattcccagatgatcacatgatcgttttatttttttagtgaaacttaaatcactttcactgggctttggagaacctgagggatgattatgtatgataatcaaagaagttgccatgtttttacaagcataatgtagaatttctcttggctctgctactgaacgacgtacagtaccaataaaaatagttctctgttcgataatacgattttgtgtatccatataaatagctactaaatgttcttgttttttatcccctaattcgagcatcattttcctcgctaattgttcactacttaaaatttgctctttacgatcatattcagctttgtgaatccgttttgctagttctagcatagcttttatttcgacggatttaacctgaccgattcctttaatggattgcaactcctgtaaggataattgaccaaaatctgctaaactgcttatgttttctaaaatttgcgttgaaatttccagaacaggtttttctttaatacctgtacgtaagagaatggctaataactcctgattactcaatctatctgcgcctaaatcaactaggcgttctcttggtaataaagcttccttttttaattcaatatggtacataaaacacctccagtcataatattcgtaaaccaatcaaaaactcatgttttaaatcaataaaaaatacttagatgaaaaatctaagtattttttatttaacgataggttcgtgcacaatttctaagcgtttgtcgcttgataatatgatcttttacaatctgatagatagtagctgcaacaggaacagcaagtaacatgcctaaaatcccccataaagcacctccgatagtaatagccattaaaacccacatagaaggcagtccaatcgatccaccgacaactttcggataaatgacatttccctcaaattgttgtaaaaggatcaagaaaagaacaaacaagaatgcttcagtaagcgattcagtagcaattaagatgaaaccgattgtaacaccaatgtaggctcccacaaccggtattagagctgtaaaagcaactaaaaccccaactgttaaagcataaggaaattggaagatcaacataccaataaccgtcaaacttcctaaaatcatagcttctaaagtttggcttacaaaaaaaccatggaaacgttgatgaaggatatgacgaacgtaatggaatgttttgcctgttgaacctaaataggtatcaattaacaaattaaactgacgtcccaactgctccttgtttgccaaaacgtaaattgaaaaaataaaactaacaaaaacattcaggagtgttgccgcaatagaggaaactgaggttagtaaatttgttaaaacagataaaacttgcttcaaaatctgctggctataaccacttaaagtagaaactaagtctttatctgttcccatataatttaaaacctcagaaatttgtttattctcattgagattattaaccaatttagcaagtgctccggtatcaataaccaataaagaactcaaactagaaatcaaatctggaatgacaattgaaaatagccagacaattaaaccaataaaagttgcataggataaaatcatagaaacactacgcttgattgccattaatagtctagatcctttaaaaagctttatatataatcgctcatagactgacattacaatattaataatataggcaattccagctcccatcaaaaaaggaaatattgccttatgaagcgtagttaaaatattagaaacagctccccaataagcctgtatagcatagcaaatagcaaatgttatgacaacataatagacctgccgtttttcaaatttcatgaaatctccttattaatcttaatttctttcaattattatacactattttatgaatgagaaaaagagagttaacagttattagtctgttctttattctatttgactgccattacttgcaataaccttcttgtaccaataaaacgattttttcttgtaacgcttgagtgtcccctctcctttattattgcgatcaacataaatgaaaccatagcgtttttccatttcaccagttcctgcagatactaaatcaatacatccccatgtagtatagccaattagattaacaccatctacatatatagcatctctcattgcagcaatgtgctgacggaggtaatcaatacgataatcatcttctacgtaaccattctcatcaggaatatctactgctccaagtccattttcaacaataaacatcggtttttgataacgatcccagatagcatttaaggtaatacgtaatccaagcggatcaatttgccatccccattcagaagatttcaagtaaggattcttaagagatgcgaaaatattttcttgaacctgttcactgacagttggattacctgaagctactcggcttgaatagtaagaaaatgaaataaaatcaaccgtatagtctcttaacaaagcaagatcttctgctgtcatttgaattgaaatacctaaatgctcaaaatgttttttagcataattagggtatttgccacgagcttgcacatcaataaaaaaataattttctctatttttttgcatcgaagcccaataatcttgtggatgacacgtatttggatagtattgacctgcagctagcatacatccgatttgattatttggatcaacttcatgagcaatttttactgcaatagccgaagccactaactcatggtgagctgcttgatatttaatttgctcttgattttcaccatcttcaaaatataagccagcgcccataaaaggagcgtgtaaaatcatattgatttcgttaaaggtcaaccaatatttaactaaccccttaaaacgagtaaataaagctcgtacaaggcgctcataaaaaccaatcattttacggctccgccacccaccgtaatgtttaataaggtagataggacagtcaaaatgtgtaatggttaccaaaggttcaataccatacttacgacactctttaaaaatattttcataaaactgaagaccagcttcatttggatatagctcatcaccctttggaaaaatacgcgtccatgctattgacatacgataggttttgaaacccatttctgcaagtaatgcaaggtcctctttataatggtgataaaaatctattgattcttttgctggataaaagtatccttcctcaaaatcaaacattttcttttgtcctgaaataattgcaaatcgatcttctccagtaggaacaacatctacatttgctaggccacgtccatcaacattgtaagctccttcgcattgattggcagcagttgccccgccccataaaaaaccttttggaaatacttgttttaccatcatttacccctcttgttttttcttatcataatattaaaaaagaccagttactgacattgattcgccaaatactggtactatccatgacatgaactttctacttagaaggtcttttcactaattctgtgtatttaaatacttaaaaatagtatcaaaacacttttaaaggtagagttttatcgtttcagaaattttagcataggcttgatctgttaggtgcaaaccatcttttgtaaaactgctagcaagctgacctttttcgtcaactaataaatcatacaattcaatataattaatgccagaaattactgataaggttttgtttaaagcttttattgtttgattatttcttaccttgacacgctctatatagtcatcttcttcactaacaggtaaaacactcagtatattaatctctgtcatataagattccgcacgaatttctgcaattatatccgtgatattagctatgatttctgactgtgaatgccctaaaccaatatcatttgttccaattaaaataaatactttggatggtaatagttcccatacttgggttctcaagttttctaaaagccaataagtatctgatcctgctactcctctattaactaaaggatagtcacgtcctaaatgtttttttaaaggaaaaaactcaacgatagaatctcctgtgaaaacaatggcaccttcttgtactgtctgattgttaatctcaaaaaactgttctcgtttcatttgataatctcttaaagctttgtcaataacttctaacatcgttctccttcattattaaatatttctctaggctttcttgtattataacaaaatttcacctgagaattgaatagtatgcttcgttaaaagctacgtggtcctattcattatcactcatcttgtgaagaaagttctctatcgtttctaacacaccatcttgatcgttactaactgtttgatatttagcaatagctttaatttcttctggcgcatttgacatagcgtaagaaatatttgctgctctcaacatttccacatcattgcccccatcaccaaaaaccatcacttgatcctgtttcaatccccacttttcaaggagaatagcgataccatccgctttattgacatcagctggtaagacatcgatacaaccaaaaccactagaggtcaatctgatatgatgatttttaaagtgttcactaatatctaacaacatctcagaaacaagattttcatttacccaaagtgtcatttgaaaatagcggtcatcatctaagggcagcaaatggtctttatagataaaattaggcatatagtattctaattcagtccgcctattaataggagttcttcgctcaaggtatgaacgtttttcaccagataagctgatgagtgtctcaggatagttctgatataaataggataaaacagctgcaactgtatcattagataaataagtttcttttagtaatgtgccatcttggtcaatgacacgaccaccattttcagcgacgtaggcgatacgattagggtattccaaaaagtttaacaacaattgatcgtataaattaccactagcagctacaaatttaatatcatacttctccatcaacgttaataaagaagaaaaccgtgctttatcataagttttatctgagcgtagaaaagttccatccatatctgttgctattagtttaatcatacaagtaacctttgcctttcaagagggtgccaaatatctcaatatgttctttcattatatcacatataaaccaaaaagatttgatacctgatacgtcaacggttctattaattaagttaaattttgtttcagagattaaatcgacttttacctatacttatctccatactatcagagcttgtttaacataatgatttactgaagagttttcttattgttgagttgaataatagattcgtaactattacaatagtcataataaaatatttgagattcgaaattgctatacgtgtttttgagagacctaacattattttttttcacatagttattctgttttgaaaaaataaataattgagtatattaataaatttggtcatattaatacaacaaaaaatccttacatgagataaggagattaaacgaccctgtaaggattttgaagttattagaaacactctaagcaaaaattttaaagcgttttctctatgacttatattatatgtcatgttcctatacaaaacttacactatcctttcaaaaaataatactatcctacgaaacccattttttgatagttttctgttataataatactatcctacgattttagaaagaaaaacgatgaactcacttgataatttactatcacataatttagaagataaccggcatttattaccctatgaacacatgcatactgaggttagaaatggttaccctgacattttatttcactggcatccggaacttgaaatttcatatgtccacgaggggaccgcacgttatcacatcgattatgatttttttaatagccaatctggtgatattatcttgatccgtccaaatggtatgcattctattcatccgattgaaaataaagagcatatcacagatagcattaaatttcacttagatttaataggatattctattgtagaccaagttagccttcgttatttacaaccgttgcagactagctcttttaagtttatccaatgtatcaaacctagtatgacaggatataatgatatcaaaaattgtttgtttgatatttttaatatttcaaaagaagaaaatcgacattttgagctactcctaaaagctaaattaaacgaactcttgtatttactctattatcatcaatatgtcattaaaaaacatactgatgatacctacagaaaaaacgagagaattcgtgatctgattgattatattaataataattaccagcaaaatcttaccattgaatttttagctgattatatggggtatagtaagacacattttatgaccgtatttaaacagcatactggaacatcctgtacagaatttatcatacaagttcgtcttaataaagctagtgaacatcttattaactccactacggccattattgatattgccaacagcgttggttttaataatctatcaaattttaatcgccaatttaaacgctattatcatacaactcctcgccagtaccgcaaacaatttaccaacaaaaaagacggtagtacgcttgtctatagaaatataaatacaaaaaaatagaaactagttaaatccatgactagtttctattttttattatttaagcgttaattagtttacatcagctgttcacgtacttctttaatttccgattcattcacaactaaaaaaatggtgtcgccagcattcaagatagtatttcctgatactacagccgatgtcttatgatgaatttgagtcgttattaacacattttctggtaattctaaatctcggacatactttcctgatattttatctgaaacagttaattcaatcaatgtaggtgtcattactttatcttttggattgaaggtcattttagccaacatcgcttcataaataggttctccctttaataaatccatgacaatataagataccatcgttacaattccaatagccattaattgttttaaatcgccaaccatttctgtaaccaaaatcatagctgttagtggtgcttttgagattgcaccaaaatagcccgccattcctagaacaacaaataaagatatctgctgatgagatattataccaaagtactgcatacctactgcaaaaaaagcacctgctaaagatcctaaagctagaattggtaaaaaaattcctcctggcaagccactactgtaactcaacatactccataaaaaacgaatgaggaaaaataatcctaacatcatcagactaagattactcctaggcagtgatacaattaagccatttccaccccccaataattgtgggaaatagtaaccaataggaagaataaaaattaccgctaatataccatataggtgagatggtagatgaaatagtttgcccaaataatcatagatcacatgaaatcttaaaattacccactcatagataaaacctaagatacccaaaaagagacccatgagtaaaaaaatccaataaaagttgagatttaaagatggtaattctgatggtaaagctaaaactggggttaaaccaaagatattaagtgagacaaagtttgccactaaacttgctaccaaagctgttatccaaactaagcgagaaaaatgatggtaaatttcttcaactacaaataaaaggcctgcaataggagcgttgaaagctgctgaaagacctgctgccgcaccactagcaattaaaacacgtttttccattcgactagcattgagatactgtgcaattcccttgcctgtcatagctcctaactgaatactgggaccttcgcgaccaagcataagtcccgaagaaatagctaaaatacccgcaatgaatttcttccatacaatactaaaccagtctggcgatagcattcctttaagttcaccttcaacatgcgggatacctgaacctttaatatcaggatcagatttgataaaaaaacctattatcactgcagcgataatactagtaaccgtaatgctcaataaaataattggttgataatgggcacttttataaagttccataacaactaaaaaaattttttcaatcgctaatcgaaatatgctgacaacaaatcctgctattaagcctactactattcctctccaaacaaatcccagaattgattcaagtgaaaactgaaattcatttttatgattttccatattttcctccttttcttacaattattttagcaaaaatatcacaaactttctaggaactcttggtaactaaaaatacctctcatcagagaagtacttttagttaatagattacttacgatacattttaaattgtaagtacaaatcattgtaaataccaagccatttttgacccaagttattataaacttctaaatgatcaattgttttatcaggaggataaaatgctttatcatttttgatatctgctggtaacagcgcttttgctttgagattaggggtcgcataaccaatatattctgcattttgtgccgcatttttaggttccatcatgaaattaataaaggcataggcttctttgcgatgctttactgttttggggattacaatattatcaaaccaaaggttcgatccttcactaggaacaacgtaatgcaaatgcttgttcccatcaagcatttctcgtgcttctccagagaatgtaacaccaatcgctgcatctccctgaatcatatagcctttcatctcatcagcaacaatagccttaacgtttggtgttagagcatctaactttttagaagcggcttttaattctgatatgttctttgtattcaatccatatcccaaggaatttaaaccaactccaataacctcacgtgcactatcaactagcatgattttatttcgaaactctggacgccataaatcatcccaatgtttaggaggagttttaactaattgatcattataaacaatcccaacagttccccagaaataaggaatcgaatatttatttttaggatcgaaactcaaatttttaaacctggctccaatagcatcccaattagctatctttgaatgatcaagtttaaccagaaggttttcttttatcattttgtcaatcatataatcactaggtacagcaatatcatatgtcgtcccaccctgcttaattttggtgtgcatagcctcattagagtcaaacgtttcgtattgtacttcaattccagtttcttttgtaaatttttttaataaggctggatcaatatagtctccccagttataaataactaacttatctgagttaggtgttgaactactctttttttctaagtaagtggttaaaccaaagaggatcaggataacaagaacaataccgcctaaaaaggaataaactctacgcattcttttctcccttctctttcgaaatatagtaataaccaattaccaataaaatactaaataaaaagacaatagttgacaaggcgttaatttccaatgatataccgcgacgtgcgcgtgaatagatttctactgaaagcgttgaaaagccattacctgtaacaaagaaagtaaccgcaaaatcatctagcgagtaagtgaaagccataaagaaacctgaaataatacccgacgacaaatagggtaacataacttctttaagcatttgccaagttgaagctcctaaatcataggaagcattaatcatatcatcattcatttcttttaaacgaggtaagaccattaaaacaacaataggaatagagaatgcaacatggctcaataatacagaagtgaaacctaactgtaaaccaataacagtaaatactaagagaaaacttgcaccaatcataacatctggtgctactaaaaggatattattaagcgataaaatagaggtttgatgtctacgtcttacctgataaatccaaatagctccaaaggtaccaataattgtagctaataaggcgctaagaaaagccaaaaagaatgtttgcactaaaattagcattaagcggctatcctgaaacagttctccatagtgactaaaggtgaatccagtaaaagaattcatatccccacctttattgaaagaataaaaaatcaaataaataataggaatataaaggataataaaaacaagtgctaaatagatatttgcgaattttttcatgctttcctctcctttgttaaccacataatagcaaccatcactaaaattaaaataacccctatggttgagcccatacctttattttgtgtgattaaaaaatgttgttctatggctgtccctaaagtgataactcgattaccaccaataagacgcgtaagcataaagagactcaaactagggataaagacagactgtacacctgctcttacaccattcagagataaaggaaatataaccttctgaaaagtttgccatgcatttgcacccaagtcatcacttgcataaatgagattttgatcaatatcatccaaggcattaaaaatgggtaataacataaacggtaattcaatgtaagctgctacaaaaagaaatgaaaagtctgtaaatagaatctgttttgggccgatacctataaaggttaagaaggcgttaattcccccttgttgaccaaatatccccataaaagcataggcttttaacaaaagattaatccatgttggcaaaataactagcattagccataattgcttgtgttttaattttgtaagcaaataagcagctggatagctaatcaaaagcgttatgaaactaacgatgcctgcatataggaccgagttaaagctcattttaagataggttcctgagctaaaaaacgtctggtaattagctaaagtaaagtgcccattaatatcaaagaacgagttccaagcaatcaaagcaacaggtgctaatacaaataagaataaccaagccatataaggaattgaaaatagactagaggttttcttcatttctctcctcctcgatagcattgattaaaccatcctcatgatcgtcagtgtctacatattcttcaatgcgcgcatcaaattcttcttctgtttcattaagacgcataatatgtatatcttctggagtgaaatctaaaccaataacttcaccctcaatagctttacgagttgaatgaatcatccattcattacctaaatcatcataagcaataatttcatagtggacacctcgaaaaagttgtgtgtccactttaacttgaagttttccttcatcgggtagggtaatttgaagatcttctggacgaataactacttggactgattcattagggcgcataccgccatcaacagcctcaaagcgcttaccgttaaattcaaccaaataatcctcaatcatcttgccagataagatatttgattcacctataaaagttgctacaaaatgattgataggttcatcgtagatatctactggtgttcctgattgaacaatttcaccttcattcatgacgaaaatccaatcactcattgccaacgcttcttcttgatcatgtgtgacaaaaacaaaggtaattcctaaacgttgttgcagttcgcgcaattcatattgcatctctgtacgcaatttcaaatccaatgctgataagggttcatctagtaagactactttaggttgattgatgatagcacgcgctatcgcaacacgctggcgttgtcctcctgataatttttgaatggctcgtttttcaaacccttctaaacgaaccatttttagagtttcttgaacacgtttttgaatttctttcttatccatttttttcaactttaatggaaaagcaacgttttcaaaaaccgtcatatgtggaaacaaagcatagttttggaaaacggtatgaacatcccgtttattagtgggaacatcattgatgcgtttcccatctaagtaaatatcgcctgtactcgcctctagcaaacctgcaataatatttaagatagttgatttaccacttcctgaggcccctaataaggtgtaaaatttaccttcttcaagttcaaaattaatatcttttaagacaacggtgttgctgtcttcaaatacctttgatacatttttaaatgcaatgattgggttagtcaattctcataaatcctccatttttctgactaaagtaagcactaaactactttataatagcgactcaccgataatacgaacttctggttccaaatggacacctgaagttgattcaacggtgttaataacatgttcaataagattttcataatcttgagctgaaccttctgcaatgttaaccataaaaccagcatgtttttgactaacctctactccaccaatacgttgacctttaagatgtgcttcgctaatgagttgccctgcaaaatgtcctggaggacgtttgaacacagaaccacaagaagggtattctaaaggttgtttcagctcacggagataggttaaacgatccatttcctgagtaatcatgagatgatctcctggttttaaggcaaacttagctgatataacaatatctccactctcttgaatgacagaatgacgataaccaaattgcatattcctagcttcaatcgttttgagttcaccctgtggtgtcaaaacctgtgcagacaataaaatatgagcaatttcaccaccgtaagcgccagcattcataaagaccgctccacctacacttccaggaattccgcaagcaaactcaaagccagttaagctatgataacgtgcaatacgagttgtttcaatgagattagctcctgcttctgcttcaataacataaccgttgactgtcacagttgacagtttatcaaacatgataacaaaaccacggataccaccatctctaacgataatattactcgcatttcctaaaaccatccaaggaatattttgactgttagcaaacttaacaatacgcgatagttcaaggcgattccttgggaatgcaagataatcagcaggtcctcctactttagtataagtatatttctttaaaggctcatcaaagcgaatatcgagaccttctaattctttttgtattgttttaatcataacctttatctcaattctgttttattgtgttttatagacacaaaaaatcggcataaaaccgatttctattataccaaaaatataggttgttgacgatacattatcacaatttctgtgtattttaattttaaaatcctaactgactattcgactggttttaaataatgaacttctcctaaattcaatttttcgagatagtcttctagcttagaaccattaggtaaacttagttgaggtgctatttcgagtaacggaactagaacaaatgctcgcttcgtcatatacggatggggtactactaaatcttcttggttaatcacttgattaccaaaaagtaagatatcaatatctattgtccttggaccccagtgctcatgtctcacgcgctttaagcatttttcaatttcttgacaataatccaataattcaaaaggtgctaagtctgtctctacctgacaacatatattaaaaaaatcttcttggttagtattcccccaagcagctgtttcataaatagcggaaatttgcgcgacttttgtcttttgcaaatgatcaattgaaaagagagcctgcttcagaaaagtttctctatcaccaatattactacctaaactcaagtaaacggttgtcatgctcgcctgcgctccaattcaattccaactgattcatagtgcccattaattggtggattgtcttttgtaatctttaatgtaatagcttgtactggatgaaactgtaagaaaatatcttcaacaataacacctgctaatttctctattaattgatactgttcgttttcaacatgatttttaatacagtcaaaaacttcaccataatgaaccgtatcaattaaatcatcagtttgtgatgcttttgccaaatcaagtgatagaacagcatcaacttgaaaaacttgccccaatgtttgttcttccgaaaaagcaccatgataaccataaaaccgacatttatttaaataaatcttatccatattacaccaactgactaattactgtcacaatgtccttatttacttcaacattgtgaacacgtacaatctgacacccctttgctattgcccatgccgataaagcagccgtccccatatcacgttcagttacttccctattaccacctagaagataattaacagtacgttttcgagagatcccaaataacacaggataacctaaatcacacacttgttccaaaccttttaatagttctaaattttgctcctctgttttagcaaaaccaaagccaggatctatccaaatattatcctttgaaacacctgcttctaaagcacgctctgctctttcaagtaagaattcacaaacttcttttttgatatcttgataaacagcttcttcctggttatgcatcaaaataattggaacatttcgttctgctgctaaagatagcattttaccatcatataaacctgaccaaacgtcatttaaaatatgtacacctgcatcaagggctgcttgagctacctctgttttataagtatctattgataacaaaagatcagggtagacctctctaatagctttaatcattggaactacacgtttaatttcttcttcagcagtcacaaatactgcacctggccgcgttgattctcccccaatatctacaattgccaccccttgttcaagcatctcaccaacttgatttaaagctgaatcaattgtggtataagaaccaccatctgagaaggaatcaggcgttacatttaaaatccccatgatacaagctttacctgtaatatcatattgtcctattttcatcttttatcctttttgtattagcgatagaatttcttgtctttcatatcgatcgtccttgtataaaccacgagctaccgttgtaatcgtcttacttcctggttttttaatgccacgcattgtcatgcacatatgctctgcttctatcataacaaaaatacctttaggcgccaaagcatcctctaaagcttgtgcaacttgtgctgttaaacgttcctgaagttgaggacgcttactcgccacttcaactgcacgtgcaagcttactaagtccagtaacacgtccatcgtttggtaaataagcaatatgagctttaccataaaaaggaaccaaatgatgttcacacatggaatagaatggaatatccttgacaatcacaacctcttcatgattttcagaaaagactgcagtgaattgctcctttggatcttgattaagtcctgagaacatttctatatacatttttgccacacgcttcggtgtatctttcaatccttctcgattaggattttctcctaaagcctctaaaaattgataaatagctttttccattttttcttgattgggcattaatttatcctatcctttttaagttgttgtagttttgattaatagtagctcctgacgaacttgagaaataaaataaagggagccagtaatcacatagaaatctttatctgatgtcagatttatatcatgtagccatttcttccaatcactaactctagtgtacgctttaggatatttgtctaagtttattgatttagggtaatcaaagctagtaaccgaaaccggagcgatactagacaatgattctaacatactctctatcggtttagtattaattgcagcaaatagaatatgcacgtttttctgctgatatttttttataacttgaacgagagcatcgacactttcattattatgagcgccatcaatcattacattcggaaagattaattctgtacggcctacccattttgtcatttcaagcccatctttaatggtctgtagggttaactttggatatttgtctcttaataataaactggtagttatagctatgctagcattggaaacttggtgatgtcccggcatttgcaactgaatatgatcaatatttgcttgaggacctatatagttaaaataattttcctcttcttttatataaaagtcattgtgtaaacgataagtctggctgtgggtttccttggcttttatttgaaagacttcttcaacatcctgacgatcattagcatatacgaatggaactcctttttttaaaacacctactttttgctcagctatatctacataagttcgtcctaaaacctcctgatgatctaatccaattgacggacaagtaaccgctaaagccttgaacatgttggtagaatcataataaccgcccattccagcctcaataatgacgatatcaaccggacagctattgccaaaataatagaacatcaaaactgttataacttcaaattctgtagctggttctaggttggtctcaaggtgcaaccgttcaacaactggacgaacagtttcaacaagtttgataaaatcagactctggaatcatttgaccatcaatgctaatacgctctctaaagtcaacaatatatggtgatgtaaatgttccaacttgataaccagaattggtaaaaatatgttgtaaataactagttgttgatcctttaccattcgttccaacaacatgaatggcagataggttgttttgagggtttcccagctgctctagcatccatctcatacgttccaaacctggtttaataccaaaagctaatttactatgaatccattctagcgcttcttgataagtcatcttatttacctttctttaacatcgtatgtacttgtccaatactaaaaactaaaatagcaagccagataaaaataaaacctattacctccccactaacgatagtttctttaaaaataaacaatgctagcaataattggatggttggattgatgtattggataaagccgataatatttagaggagccctcttaatggcttctgcaaataataaaagaggaactgctgtaatgattcctgaaagtgagagtaaaactaattgtaatatattataatcagttagaaaatctttggcgaaaaacactatataaatgagtgcaaacggagcaataaaactactttctaccagcatcgaaaaatcactagataaagaaattgatttttttaataacccataaaaaccaaaagaaagcgctagagttagtgaaattaaaggaaaatgaccagtttgataaactaaaattccaactcccatgattgcaatcaaaattgcaaggctaactactcttgccaggtgttcacgtaaaacaaggaccgacaacaaaattgaaataatcggcatcatataataaccaagacttgcctcagtagcgtgaccatgcgtgactgcaaaaatatagaccaaccaattaattgaaattaaaatactggctacaaacattgtccaaaatgactttttattattaactaagccttttaagtcttttaaatagactgtttttctacccgaaacgagcatataaataagcatagttaaaacagtgaatataatcctataagcaaacgtactatatgcttcaattccagataataatttccaataaagagataacagcccccataaaacataggctgacaagccaaggataattcctaaattatcttttctcaactctcactccttttcgctcaatattaagcacttgaatctgtccacctaaacataatttacttaactctgtgacaattgcttgttctttttctttcgaacacagaaccattaccgtcggtcctgctccagacaaataagtagcatacgcaccattttgagtgctgatttgttttatcacttcaaattccttcaccaaaggttgacgatatctttcatgaaagaggtccctttctatagcccatccagcagttaccaaatcacctttcaacaacgacgcaaccatcacattagcgacgctgcttgaagcaactgcatcctcataactcaatttttgaggtagtacatttcgactatcacttgtttttaattcataatttggaataaaagcgataaaggaactatctggaaacatcacttccaaacttttaatatcatttttcactattgatgaaataactaaatcaccaaaaatggccggtgctacattatcaggatgtccttctaatcgggtagctatctctaatttttctttttgagaaagagccaaatttcctaattgattggctaattctattcctgcaacaattacagaggaagaagagcctaaacctctggccaaaggaatatctgaaaacatttttaagcggtgtggtgccaaatccgacttaacatgcaaagctgtttgaataaggaggttagtatgatcttttggaatatttactaaattgtgttcaactaaccactctgtactttcttctaatacttcaatgattaaatactttgataacgcaactcctattgaatcaaagcctggaccaatattcgcactagttgcaggtacaattatcctcatttcaccctcctattactttgaaaacattgattaactgaatgacaccactctcaggaaactcctcaataaattgagttattttctcttggctaacttcatctgttaatacatagatttcttgttgtttatcacccaatgctttttcgataacatttttcaaacctatattttcttgctcaaagtaccttccaagtgtatcactatcttcagcatttctcaaagaaatagctagatagtactcattgaaaatatcagactgcattgacaacctacacggacaatgataagtattcataggcttaatttttatctgtgatcgaatactacgactaatatcgatgatatccgctaaaacagaggttgctgttggattttgtcccgcacctggtccataaaaaagagactgaccaatccctattgattcaatgaatactgcattcatcacatgattaactgcagctaagggatgcttttgagaaattagtgtcggagaaacgtctacacttataccagttggagtttcacgaagatcagctaccaacttaatggcaaagcccatctcctgagctacttcaacatcctctgagcgaatactagaaatccccttataattaacatcatcaaaatcaataggcataccaaatccaaattgacttaagatagtggctttgtaggcagtatcaataccttcaacatcatttgtgggatcactttcagcataacctaactcttgtgccttttttagagcttgttcataagaccatccctcttcaaacatttttgttaacatgaagttggaggtaccgttgagaattcctaataaacgtgtcattttatctgaggcaaacgaatgcgatagggtccttaaaataggaatgcctccagcaactgctccctcatagaataaagctagacctctagcgtctgctaaatccatcaactcttttccgtgtaaagcaatgagatctttattggctgtcacaatatgtttaccaaatcctaatgcttgactcaaataagttttagctggctcaatcccccccattaattccactacaatatcaatttgtgaatcttgaagaatagtatttatctctgtcacaaagttataagtaaatccctgattgatgaaacgctggcggctttcattatctcttactaatactttatcaatcacaatatcttcgccttctaaagaaagtagcttatgttgattttcttttagcaaatatggaatacccttagcaaccgttccaaaacctaataaagctattttaatagtcatgaatttctccttagaaattgtctctaacttcaagacaaacattggctatattataacaaattaccaatattttttatagggcaaacgcgtcttgtcctatgaaagttcttaaaaagagaatattatttcagaaaagatgatacaataaaagtactttaaaagttaaggagaaataaatggcacacacacctactagtcatcgtaaaccacgaaaacgttccccatggttagctattgcttctgtcttttttttgttaatagctttaatcggcatatttctattcttcaacaatcgttcaaagcaagaaataaaaacaaaaacgaacgcctctagtcatcgaaaaattgtcacatctatcaaaaaaaagaaatggattaagcaaaagactcctgtcaaaatacccattttaatgtaccatgctgttcatgttatggacccttctgaagccgccagtgctaacttaattgtggcacctgacatttttgaaagtcatataaaacgtctcaaaaaggaaggatattacttcttagcccctaacgaggcatatcgtgcactaaacgaaaatgccttacctgaaaaaaaagtcatttggattacttttgatgatggaaatgctgatttctacactaaggcataccctatactcaaaaagtacaaggttaaagccactaataatatcatcactggctttgttcaagaaggacgagaatctaacctcaacgttcaacaaatgctagaaatgaagcaaaacggcatgtcattccaaggacatacggttactcaccccaatctttctctcttaactccagaactacaaacccaagaaatgacactatcaaaacagtttttagatcaaaaactctctcaagatactcttgcgattgcttatccatcagggcgctacaatcctacaaccttggatattgctagtcaatattataaactagggcttacaacaaacgaaggagttgcaacaaaagataacggtttgctttctcttaatcgaattcgtatcttaccaactactagcgatgatgatctgatcaagacgattaaccaataaaaagaagccttctggcttctttttattcttcataagatttaaatggttcatttttacgtggataacgatctggagaaatcgataagcccatttcttttttctcatggaaaagctccactaataacgctagcatcatcaaaatcattacgaatgaaaatggcagagcgacaataattaaaacgttctgcagcgctaacagaccaccagacaagagtaagacaatagcaatcactgccaacaccagcccccaaattactttagttcgattttttgggtttaaattaccatcttctgtcaacatagccaaaacgtacgttgcagaatctgctgatgtaataaaaaatgaaaaaattaaaatgatagcaataatggataaaagccaacctaaagtgtagtgattaaaagtagcaaacaatacttcctctgttgcaaactttgtcaaattagtacccagttgttgtacctgagttgataatgtgccaaatgctgcaaaccatacaaaactcaataatgtcggtattaaaagaactaccgttaaaaactcccgaatgctacgccctttagaaatacgagcgatgaaaactccaacaaaaggagaccaggaaatccaccacgcccaataaaaaatcgtccaattatcaatccaagaacgtttagtattgtcaaaagcagctgcacgaaagctcattccaaagaaattttgtaaataagagcctaaagactctgttagggtatcaaaaatacgaaccgttggtcccaatacaataactaaagctaagagggctaccgctaaaatcaaatttaagttcgataaaattttaacaccttttcctaaacctgataaagctgacataacaaataaagctgttgtaatcaggataataacaatttgaacaaatgcattattgggaacacccaataaaaaacttaaccctccgttgatttgagcagctccaaatccaagtgtcgtagcaactccaataactgtagcaacaactgtggtgatatcaacaatttttcctagccaaccatctgtcttatcaccgaaaagaggctttaaagtgacagacaagaggtatttctcttgctttcgaaatccaaaataagctagagctaaagcaaccaatgcatatactgcccaagcatgtatcccccagtgaaaaaatgtaaaacgaaatgcatcagctaatgctgtttgcgattccttaggtgcaccaggtgtcgaaatagcaaaatgcgataagggttcagctgctccgtagaagaccaaaccaatccccatacctgctgaaaacatcattgctatccatgatacagttgaatattcaggacgtgaatgaggttgccctaaacgtatttgtccaagaggactcataataaaaaagacacacaaagcaagaattgaagtaactaacaacaagtacaaccaaccgaaattggtagatacctgttcacgcaagatttgtgtccaagattgaaaaccacgaggaacaataattcctaataagactaaaataagcgatacaattagtgaacctgtaaatacaggcgtaatatgttttttactcaaaatttcctcctatactaaaatagtatagcatactttaataaatactcctctcattttaaccacctgtatcaagacctctccttgtctcctcaacaaaaaagaaccaaataacattatctggttcttgtgtttgacttagtgattaatcactatttggtgtaaataccaaatgttcgttgacaaaggcatcaaatccaagttggctcaactcacgaccatatcctgaatttttaatacctccaaacggtaattccggtaatgatgtccaccctgaattaataaatgtcatccctgtttcaatctgagccgccacttttttagcatgttctggatcagaagaaaaaacagtgcttcctaaaccataactagaatcattagctaaagcaatagcttcttcttcagtatccactttatagatagaggctacggggccgaaaatttcttgattatagattggatttgctttagtgatattcgttaaaacagttggcatgacgaagtttcctggatgatctatagtgtcatttccaaaaactacctcagcaccgtggtctaccgccaatttaatttgttttaaaacatcatcctttgcacctgcagatgacagtggagccaaggttgtttccgaatccattgggtcgccccatttagcagacttaaaggtctcaactaccatatttacaaattcgtcatacttatcagccatgacaatgaaacgttttgaagatgtacatacttgacctgcattatataaacgcgcaaagaatattgttttactaagtaaatcaaaatcagcatcatctaaaataagaaaagcatcgttcccacctaattccatagacgattttttcaaatttttaccagcttcagctgctattgatgccccaccacgctcagaaccagttaaacacacacctgcaacacgaggatctgatataaggtttgaaacttgatcatacgaagcaaaaatatttttaaacgctccttctggagctcctgcttctcggactaaatcctcaaacgcttgagctgaggcaggacaaatagaagcatgttttaaaagcatagtattacccactataaagttaggggcaaatacacgcataatctgataaaatgggaaattccatggctcgacagcaagtaaaacaccgacagcttgcttcaaatagtaagcctctccatttggactttctaacggaacaggttttaaaaacttttgcccattatcagcataatagtcagctatgtctgcacacaagtccacttctccttgtgcttcagtgaaaagttttcccatatctttagtcataacttcagcgtacttatcacgatccttacgtaataaatctgctactttatgcaattgattttggcgttcttcaacattatcttctttgcgccatgtcttgtagagggcatgcgctatgtctaatgactgttcgagatcactgtcactgatattatcgaattcatgcaatacttcgttagtgtacggataaattgttttatatgccataatgttccctccttttgatatcctcattataacatttatgaaatcgattacaaatatttagctttagacaagatcaccaagttccaaggatagcttgcattgttaaactaactataataatgcctaaccaacacgctgcacctaaaagaattgattttcctccagttttaattagtttgctaacattagtatttataccaattgcccccattgccataacaataaaaaatttagataaaaccttaagtggctcaaagatacgtaacgaaaaacctaatgaagcaactatcgttgttagcaaagaagctaagataaaataaagcacaaacttcggaaatatcttagtaacacttacagattgttctttctgcgtttgtttcatatggtaaatagataatacaatcgtaattggaatgatggctaatgttcgtgtcaatttaacaatagtagctccgcccaaagtattgctgtgattgatagcatcccatgcagtagcagttgctgtaactgacgaggtatcattgacagcagtccctgcaaataatgcaaaaccgtgatcagagagaccaataaaattccccagcgttggaaaaattaaagccgctaagatattgaataaaaaaataaccgaaatagcttgtgctacttcatcatctttagcattaataactggtgcagtcgctgcaattgcggacccaccacaaatagatgaaccaacacctattaaagtagcaatcgttttatctaacttaaataacttttgcaaaacataagcaataatcaatgaaatggaaatcgtcataataatgatgggtaacgatgatataccaactttcatcacttgcatgaggtttagtccaaaacctaataagacaactgctgtttgtaaaatatatttagatgtaaaagcaatacccttattaaataattgtcgattttgataaaaggatccaacaattattccaatcaagatagcaaaaactggtgctcctattaaagggagataaagcccaagcaaccaagatggtatagcaataataaagcataatattaatccaggaattttttccttaaataacatgatagtcctcctcacattgactattatatcacaagctttaaaacgtgacaggaaaaccgaaagaggaccagaatatgctctgatcctctttcattactaattcacaattatttagttactttcataaatggatatgatttttcattacctaaaatcaatttagagccctcttttttataggctgttttttcaccatttttcacaatattaccatagaacgcatttgcctttttattgatatgcgatactttaataacacttgttaagcgatgtactttaccatccataactggcaatgtcatttcaccagtattagtattatattttcctccggcagcttgtgcagcactttgaaaacttctatcaatttgttggtcaatttgttggtcagtgatttttgtttcatcaaaaatctttttacctgcttcacttaaatcattgtaagtcaaaccttgatcttttaattgtttttcaagagctttatcaataaaagtttttatagcttgatggaattttacctcatcaatttgagcagtgactgttatctttgcctcatcgtttttgacgttcatatgcatattagcgcccttaaccaaatcagctgcactaatccccatatccgctgcctgacttccaagttgttgttctatttctttctcaacttgcttctctaaagaaactgtacgccattttccctctagtgactgatgattattccagaaatagagaccgcctgcacctacaattagaataagtactagtacagttaaaaaaacttttaaaaactttttcatgataaaaactccttatgataaactacattaatcataacataatatcacaactccttcaattaaaatagtaaaataattatataaaagtttgtaattttatacattttaataaaacctattatttgtaaaaatgacataatctaaaacatttaattttactacataataattataaaacaattaatctcagtaaaggttttcatttgtatatttaaatattttttcgaattattatattatttgtcgcttttttatggtaatataaaataaatatagattttaaattaatatatacatttctatatttattgatttttatctcagtataacttagtgtcgtagagattaattcctatcattcaccgctttattttaggataactaaacaatttattgtttaaaacgaaaggatttatgaatgtctaggaaaacatttaaacgtatactatcgattggagtttgcacgctcgtactatcgatgagtctttattacactgaaaaagcccacgctattgctggtcctagtgaccgccaatacgtagaaaacccaaatcctcacattattgtaaatgttacaggtactgatcaaaacggaaatagcattttaccgcattatatcgaagtcaatgtaaagatgggacaaactttaagtaaaaaagaaattctagattatattgctcgaaatttaaactctagtgtggaggagaaagtaaaaacgttcaatacagcaacatcgagtttaaggaaagtgcttatctgaagcgtcaattagatgatggcaagacagaagaaatagcaattgataacgacggtgttactgtacctaaagacggtccaaacaaattttggattgacgttccagtaacttgtacggtaaattcaataactccaaagctccataaagtagaatggggtacacctatttcagttttacattatgtacagttcgttgataaaactacaggtaaaactttagaggattttaaaactattgattttgctgaaatcgaccttggaattcgacataccggtgatagcattaccgataaggaactatataactcagcttacagtgcctttttaagaagtaaattaactaagcaaggttatcaattccaatacagaattagtacagatgttcaacaaaatcttcaagtcaccaaaaaactttacaactacgatgtaaatgaagaattgattaactatcaaatcgaaaacaatagacccacactaaacctatctaatgaagccgagactgatatctttttcgaaagatattatgtttctagagatggagatagtttagcacgtacagaatcaacaatttcgattaaaatggttgatgccaaaactgaacaaccgctatttaaccacacattaacgggttatcaattgtcaactgtttccaatgtctataacagactctttgaagaaaatcttatcccaactacaaaatcaggagaaaaatattttattcaaaatatgaaaaaaacagctgaacaagaatatactgtttacctttcagaaacaccttattctgaagagaacgctcccgtaatttcttatgatgcaagacctgttgattgggattatcactcaggcgcttcaggatcacttgaaaatcagcctaacatctatactgaagaagattcaactgaatttttgggtaataaaccacaagcagcttgttatccaaacaaacaatttgcttgcgaaaatactgactctaaatacaactatagctatttagaaaaatagttataaccgatagggttaatctctcattatcttatactgattaaaatcattaaacttgtttccattttgactggaaacaagttttttatatttatttgtcacatataattgacagtcttcgaaaaatgatatatactcaaaatgtcatctatatatgacactcttcttagattctttactaaaggagctaataatcgtgaatcgtcttagagaatacagaattaaagctagcatatctcaattagctttagcaaaatcagttggtgtcgccagacaaacaataaaccttattgaaaataataaatacaatccttcgctagatctttgtataagactagcggaatgcctacaaacagacctcaatactcttttttgggatagtagacatctataacagactagactctctaaatctatgaaaactcgggaggttaggtcgtgttattatttcaatctcaaactttattaaatagttcaaggataggagaatattatgaaagaaaagaaaaatttggggataaaattaataaaatccctatatggtattaatggcccattcgatgaatacagagaacaaaaaatcaattaccttggaaatctattatttgcaaccactagcctctatcacattttatcctctatcatcgcctggttcacggtaagtaaatatcccacagagactgcatatactctcctagctttaacattctttctatatttttgtatttttctaattgttattccctcttatctcaacagtcatgatttaataacgtcactagaagtctcaaaaaatgactatccagtagcaataaagaaaaacaaacaaaaatttatcaaaatcgggatattttatactgtcatccagtggcttatcttgggtttaacaactagcaataacactccgctgattgtatcactattttctttaaaagttattttgtctagtattatgtccggtgtagcttacaatggagttatgtatctaatatttaaaaacaatgttgatattgaaaaagatgaataatgacaacatttcatctctaattgttctcactgtctatataaataataaggctggaaaattttccagccttattatttatggtaatatctttgcagcattaatcgccgcttcgtagtcaacatctgaattaacattgtcaacgtattcggtgtaagtcaccttattatgctcatccaaaataagaactgcacgtgttaacaaatgccactcattcatcaaaagagcgtactcttgaccaaacgaatgatcataaaaatctgataataaaatcacgttatcaaggccttcagcactgcaccaacgcttctgagcaaatggaaggtccatagaaacagtaataaccactgtgttatctagctctgataattcctcattaaaagtacgtgtttgttttgaacaaatacctgtatcaatagaaggaacaacgctaataactttctttttcccttcaaaatcttttaaagatttttgagataagtctgtagctattagtaaaaaatcttttgcaatatccccaacttgtagctgttttcctgtaaaagtaacaggatttccaagaaatgttgtcataagtttacctccttatcaattacctttattttactatgaagcttcttctttttcgaataattgaactgataattaaaggtacttacttccttcgcgtatgctcaaagtcgacaactcatcacaatgattactgataaagtcctttacccatactttattatactttgaataatccctaagcgcccagccaatcgccttattgataaaaaattcttgacttcctgtatttcttaaaataaaaagtgacaaaatatcagtatttgttttttctttaaatcctagttgatgctcaatagctagtcgcctcatccaaaaatcttgatcaagtgaccattctgacagtaaattcataaccttgtcatcttttaaggataagttcccaaaaatcttagtcagaacatcaatactatcccaccactgttgatgacgagcgtaaaactctagtctagagcaatcattataggtgagaaattgactcatagctaatagataatcaagtacaaaatgatgatattcacgatagtcactttgccaacatttatcaagcaattgccaatcaatttttgcttgtcttttagcagcctttataagctctttgtagagcatacgtcgctcaggtgatttaataccatagcacttaaaatgatggcgtaaataagcctcctgttgcttagaaacttctttgtcacttgcagctttaaatttcctctctaaacttaggaataaatccattacgtaatccccttgtatttttcaaaaagcgttgtaattccttcatgtacagattctcttgatacacgtaaattagcgtaaggagtcagttcatcaaaatcccctacttgaacactataatgcgcagcatcaaacatagaaatatcatttttatcattgccaaaagctataaaacgattcccaaataatttcttagtggcttttcccttgtcaactgcaatgggatttatgtacaaacatttttcaaattcgtggaaaaagtgactactaagtccaaaacgatttaattccgctaacatttggtctgcccttcccagctgatcaccaaaatacaacaccatttttatcggtttctcaattttagaaacttctagaagctctccccttttttgaggatcaacataagcaataaagggaattttagaagcctgataagtagcgtaattaaagacctcatcaacaaaatatggaatctgatggcgatgacaatatgaaataatagtactaaaaaagtcactttgtaaatagtaactatccactaagtgaccattttcatgtaaagtcgcaccatttaaaccaataatttttgataaagatagcttgtcgccaaggatacctatagtgtctctataagatcgcgctgtagcaaaagtgactctatgaccataatcaatctgggctctctctagtattccttgtatttctttagatagactcataccatcaaaacaaagagttccatctatatcaaagacaaaatccattctctcaaagtcccatccttaagttaaaataggttttcatacgtgcataaacatcttcatcaccaacaaaaaagatatgatctccttgctctataactgagaaaggccccggagaaacaataaatttcccttcgtgttcaatagccacaatagtcgcaccagtttgatgccatacatttaattctcctattgacttaccaaggtgttcagaatcttcactgacaataatttcatatggtgctagtgggtattgtttactaaccgcacgtgtttgaagcaaaaaatcatcaactaaagtagctaactcttccatttcttgttgctgagccttgatattatcacggattttacctttcaaaatagcaactgaatgagaggtttcatattggtttaagaattcaattgctttttctttagagagaataatggctccactgccatgctttaaagttaaaatctgtaaatctgctaaaatattaagacccttacgtgctgtttctggtgatacgttgaatgttgaagcaatagttgttctagatttcaacttctctccaacttcataatctccatttgcgattctttgtgcaaccgctactgctattttttgatatttagatgttacaatttcagattgttcagaaaccatccaaccctccttatcctaataaaaacatacatattaaaccacaattagcaaaatattgcaaatatatcttttttgttaatatctaatgtctttagtaaatatcatataaaaggagctggtctcccagctccgagtgtcttatcataaaaagtagtttactgaattaagattcactagtacgagcttctgagattttttcttttgcagcctcagtaccatttgatactgcttcttttgttttctctgctccagaggaaattgctgctttagctttgccagcttgttcagaagcaaagtttcctgttgcttgtgctgcatcagatacacgatcttgtactgtcactgagtcagcttcatgttcagctttagtcttaatatctacgacatttgcgttcaattcaacaactttaaggtgggtcatcacttcaacgttttgactgacaatcgctttaatgctttcaacgatagctgggatgtccttgccgtattcaacaacgatgtctaaatcaactgcaacttctttagtaccaacttcaacatttacaccatcagttactgagtcagaatttacaacgctattttttagattagagaagaaacctccactcacagctaagagtccgtctactgattctaaagcatgtccaacaattttagcaattaccttttcttcataagttactgaagttttaatatcttgtttttgattttccataaataaatgacctcaaaccttctagtcctttttcttaaagctctctgaagcacccttaatggtatctttaatgtcagcaagtttttcttttgcatgacctttcaatttatcaactttaccttcagattcaacttctttatcgccagtaagtttccaacagattcttttactgaaccagaaaccttatcaacttttgcatcaaatttttcttcagacataatagcctcctactaataacaatactttaaactacacttaaatcaattattgtacacgtggttcagacttcatgtcttccactttatcaacaccgctacctacggcacttttaacgtttgaaacttgattcgaagcaaattcacctgttgcttgtgctgcacttgttacacgatcttgaagagttactgaatcttcttcatgttgagcacgagttttaatatcaacaacattaacattaacttcaaccacttcaaggtctgtcatacgtttcacttcagcttcaacaacttttttgatatcggcaaagatagttggaacatgtttttggtattcagcaacaatatccaaatcaacagcaacttgctttttacccacttcgacatttacgccatctgtaactgaatcagaatttacaacgctattttttaaatttgagaaaaaaccaccatttacagccaaaagaccatctacatgctcaatcgcaattccaacaattttttcaatcactttatcttcgaaagttaattctccacgaacagctgtcgtgccagaattgttagttgtgtttttgatgtaagtttcagtcataatagttcctctttcttttatttaaataatgtagaataaatataaacgaaaaattttattttctcttattaaagaattggtcaagcatacctgttctttgcacataaagtccagcataagcacctagcacaatgataacaagagcaagaattgttttaaagaatccaatggttacaatcattgcagctaaaacgagcccaataactgcacctcctagtggatatctgtatttcctcacgaattctgacatattagactcctattctacacgacttttattcgtcttagcatttccaacattttcttcttcaacttgcttaacaaatactctagtgttcattttcttttccaacccaaagaattcttttaagccaagttcaacatcactttgaatatgttcaagttgttccggtacatttgtacgagaagttaaaagacctttaacatcaactttcacttttttcttatataaatgagctgtcacactaggagatttcatcaaaccagtttttaatacttctgttttaacaaatccctctattgcagatttttttaacatcaatttaccagttttatcagctagtttatactctgtgtatcgtcttggataaaacagaactaccaatatagccagtaaaacgatcacaaacagcactaatgctccccaaaagaaataatgatacataccaacgtcaatcggtgatggcaaattaaaatcccaatctaaccaattaaaagatggtagataaatgtgttgtttactgataacagctacaaatcctagtagggtaagggagattagacctagtaaagtatataaactttttagtccttttgacataggtaactccttttctagttattcattttacctagtacaaatgaagtaacaatgacaacaataatagcacctacgattgaaggaatcaaagccatacctgctaacttaggcccccatgttcctagtaaactttgaccaacaaatgaaccaactaaaccagctaagatgttagctatccaacccattgaaccacctttgttagtaacagcccctgcaatagcaccgataatagcacctacgattaatgaccaaattaaactcatgataaataccttctctttcttaactaatcattccactagttatgtagttatgattttttgcctaatacaaatgaagtaacaatgataacgataatcgcacctacgattgaaggaatcaaagccatatctgctaacttaggcccccatgttcctagtaaactttgaccaacaaatgaaccaactaaaccagctaagatgttagctatccaacccattgaaccacccttgttagtgattgctcctgcaatagcaccaataatagcaccaacgattaatgaccaaattaaacccatgataaatacctttcttcctaagtacatctcagtgtacaaacttattttgttcttaactaaataacaagagtttcttaagtgaccactcggcaattaattaagttgttaactatactaatattatacaactttataaagtgactgccaagtaaaaagcttggtaaatgcttttatttttaagtgaccacttgatatttaattgatattgttattatactctttttagaaaagaatgcaagagaaacgcttctttttttaaaatagtatggtcacttttagaaaacgctttaatatcaacctttttagtaagtaaaaaccaaatgataacttattttttctattcaaatgatgcaaaaagactaagaatacaattcttagtctctgattatttaagcatataatagaagaaagttagttttcctttttgctaataggagcgacactcgctaataatttctttaacccaatacctggaaaatttatttttaactcttgagtctttccgctacctgaaacttcaagcaccgtaccgtccccccattttttatgagttgcaacatcaccaatctcccatgatgtctcatggctattgttcgcgttaagagcctggagttgggcagttacttgagattgtgaattacttttacgtgcctgaagcgcttgttgaagactcattccttgaccaaattgtgtaggctgttcttttgaatatttcacaccaaatgaagaattaactggtcgagctaacccttggtattgtatcagttcatcatcaatctcacgtataaaacgggttggtctattataactagttttaccaaataaagtacgggtattagcattggtaaggaaaagtatttgttctgctctcgtaatcccgacataagctaaacgacgctcttcttctaattcatcagcatcctctattgcacgcgataaaggaaatactccttcttccataccgattaagaaaacaactggaaattctagacccttggcagcatgtaatgtcattaaagtgacctcagccgtttcagtggcgctatcatcagtatctgctattaaagctaaatcatttaaaaaacgcgatagacgatctaaaccagtttcaccctctactgtaatctctgggttatcgtcaaaatttttagtcactgacaagaattcttcaatattttcaatacgcgcttgactttctaatgtattttgaacttgaagtgcttctagatatcctgtcttatccagtaggttttctgtaatctccgttacagttaaactatctagattactacgtagagtcaaaatcagattagctaaatcccaaacagcttgagcagccttcccttttaagggcgacatcatgacatttgaagaggcatcaagaagagacatgctctgttcataggcaaatgaccgtattttttctaaagttcctggccccacccctcttttaggttcatttacaatccgctcaaaagaaatattatcagaagtatttgcaaggatattgagataagcaataacatctcgaatttctttacgactatagaattttgttccaccaaccattgtatatggaatattggattttaaaagtgcttcctcaatagtacgagattgcgcattcgtacgataaagaacggcaaaatctttgaaattttttccttgttctcgaacgatgttatcaatagttgatgctacaaaaactgcttcttcttgctcgttgttagctctatgatatacaatttgctcaccttcatcattttgagtccataattttttgggacggcgatttttattatgattaatcacattattagcagcttgaagtattttcttagtcgatcgataattttcttctaataatacaactttggcttgcggatagtccttttcaaaatcaagaatattttgcatatcagctccacgccatccgtaaatggattgatcggcatcaccaacaacacaaatatttttgaaacgcgaagctaataacttaactaattggtattgagcgtggttagtatcttgatactcgtctacatggatatattgatacctctgttggtaataggccaaaacatctttattctgatcaaataatcgaagtgtcatcataatcaagtcatcgaaatccatggcctcacttctacgtaattcctcttgataagctttatagcatttagcaattacctgtgtatacatatctccggcttgcttctcatatgcaatttcatcaagaaggtcatttttagcattagagattgtacctaaaattgaacgttcattccacttttttgtgtccaaatttaattgcttaatgattcgcttcattaaagtacgctgctcacctggatcaacgattgtaaagttacgattatatccaatataatcagcttcacgacgtaaaatacgaacacacatactatgaaaagttgcaatcaaagtatcttgggtagctggattcaaggcgatagcacgttcacgcatttcacgcgctgctttattagtaaaagtaatcgctaaaatattccaaggattaacatatttttcatctattaaataagcaatacgatgagtcagaacacgtgtttttccagagccagctcctgccataatcaaaagcggtccgtctgtcgtttgtaccgcttctgcttgtttatcattcattccaattattaaaggattcatttctactcctaattttgtcaaaattgcttctctagtatatcattttttcatctttttcccaatagaaaaaggagttaaacagacgctgtctaactcctaccttttttacttctcttttctctctccagttacaaacattgtaaaaatagcagttgtaaccatttcgcctttctgatttttaatgtgaacatcaacgactttttgtagtacgaccattatgaacacaagtaccgatgacagtaagcagatcatctaatcggcctgccctcaaatagttgatatttgattgtagagttaccgcttcatatcctgttgaaatagcaactaaaccactgacttgatcacacagtgtaaacaaataaccaccatgagcattaccataatagttgagcgaagagtcaacgaccttcgttgttaaggtaacttgaccttcttcccagttttcaatttcgtaattctcaaatacttttacttgttctaaattgaatttcattctactataacctcactttttttatgaccattatagcagaaaataaggaaaccataactgtaaacgtttttattttaaactttttaactgacctattataacaaaagagctcagatactctgagctcttttgtcatgatttcatgctttcttttggcaatattaaatttaatataatacccactatagcacttaatgctgttcctgataaagttagagcacctagatcaaggactgctccaccgaggcctaaaactaacatggaactagcaataatcagattacgaacctcagcaaaattgacacgattttcaatcaacacttttaatccattacttgcaataacaccataaagtaatatagccattccaccaagtactgcactaggaattgtagagatcaaagctgtaaatttaccaaagaatgaaaaagcgattgcaataaaagctgcattacgaataaccgttacagaagctatacgcgtcatgccaataacacctgtattttcaccataagtagtttcagctggtcctcctataagagcagaaaatgcggttgctaaaccatctccaattaaaagacgatttaaacctggtttttttagaaagttacgcccacaaatctgacctaaaactgtatgatcaccgatattttcagcaatcgttacaattgagattggaagaatggcaagcatttctggtccaaagtaaagtttataactgtgaaataaacctgtcttaaacggtaaatagaattttggcaattcaaaccaggcagctttttcaactggagataaatctaccaagccaagaatgattgataaaatataacctccaataattgcaaataaaaatggaataatcttgataaaacctttccctttagtattgataaaagctgcaatcaagaatgtaacaacagcaactagcattttacgccaatcacctttagcgacaaaacctgcattagttacagcagagtttgccaaacctaaaccaataacaataatcataggtccaatgattattggtggcaaaatcttatcaacccatgaatttcctacgaacttaataaccgtcgccacaacgacatagattagacctacaaaaagaatacctgtttgagcagccgaaatatcgccatgcatttgtttcatggctaatgccatagctgtaatataagcaaatgatgagcctaggtaaacagggactttaaattttgtcgcaacttgataaatgagcgttccgcaaccagaagcaaataaagccactgatacaggcatccctaaaataagcggaactaatatcgtagctccaaacatggcaaaaacatgttgaaaacttaacagcaaaccttgaaataattctggtttttcatcgatatctagtaataagttagtagaatgtacttccttatctactagaatttgattactttcacctttagcatttaaagtcatatctaaactagtcctcttgggcatacaaaaaagcccactttctatagcaatatagtcataggctttatttttttcctgatgtttttctcacctcacgggatgagtttaaaaacctacgctgaaagaattatagcataagacattttagaaaacaagacttttttgaaactatattgacaaaactatgctttttcattatgatagttaacataataaaatataccgaatgacgtcattcaggagaagaaagttagactttcgccgaaggaattacactctcaggtgtcttaagacaggactgattgacagacggacttctggagagacctataagtagcaacatctttgtattgacaccaagatgtgctctaggcgccgaaggggcaagaagagtaaaacaactcctccaatctctcaggcaaaaggacagaagctaaaagccaatattaataatgagtagtaagcttaataagtttactactacctttatttgtgcgctttttagctagcatctttcagaagttatctcttttagagataacttctttcgtttcattacagaatccataggtatgtcatgtatcaaaggagaacatatgctaacactttttactcatatcaatagcttcgtttggggtccacctttacttgctttattagtcggaacaggtatttacctatcatttcgcttaggttttattcaattgagacaactttctagagctttcaaattgattttccgagaggataacgggcaaggagatatttcaagttatgctgcccttgcaactgctcttgctgcaacggtagggacaggtaatatcgttggtgtggctacggctattaaatctggaggaccaggagctttgttttggatgtgggtagctgccttttttggaatggcaacaaaatacgcagaaggattattagctatcaaatatcgcacaaaagatactaatggagaaatttctggaggaccgatgtactacattatcaatggaatgggacaaaaatggaaaccattagcagtctttttttctgcagcaggtatcttagtagctcttttaggaatagggacattcactcaagtcaatgcaattgcttcttctcttgagcatactttcaaaatatcaactagatttaccagcctcattcttgctgttatagtattatttattatatttggaggtataaaatctatttcaaaagtttcagaaaaaatagtgccttttatggctataagctatattttagcaactctgattattattgcagttaattacaataagattccacatactttccaactcatctttagcggtgctttttctgggacagcagccattggtggtttttctggagctatcgttaaagaagcaattcaaaagggaattgctagaggagttttctcaaatgaatctggattgggttctgctccaatagccgcagcagcagctaaaacaaaagaacctgttgaacaaggccttatttcaatgacaggaaccttcattgacactattgttatttgtactttgacagggattgcaattttagttacaggaaaatggctagaatttgatttacagggtgctccgttaacacaagcatcttttaataccgtatttggctcactaggtagttttgccctaaccttttgccttgtcttatttgcttttactactattttaggatggagctattacggagagcgttgctttgaatatctatttgggactaaatttattaacgcttatcgcattatttttgtcattatggtcggcttaggtggtttcttacagctcgatctcatttgggttatcgctgatatcgttaatggtttaatggctttacccaatctaatagctctcctagctttgtcaccaattattgttaaagaaacacagaaatatttttcagagactaaaaatatcactaagccttgaacttactagttttatagtctgctcctaagtgatataatgtgtagatgaaaggaaattaggaaaatggcaacttctactgaaaacttacaacttgcaaaaagagggcccattattagtatcattgcctatataacactggcagtcgctaaattagctgcaggttattggtttgatgctacttcacttgtagcagatggatttaataacttatctgatatcttaggaaatgtagcactcttaattggtttacacttggctagtcaaccagccgactcaaaccatcgttttggtcactggaaaattgaagatttagcaagcctgattacctcttttatcatgtttgtcgtaggtattcaagtttttattcaaactgtcactaagattattaataatactgatactaacattgatcctctaggtgctatagtaggtgctatatctgctcttgttatgcttggcgtttatttctataataaacaattatctcaaagagtaaagtctagcgctctggttgcagcttctaaagataacctttctgatgctgtgacatctatcggcacatctattgctatcattgcggcttctctaaattttcctattattgatcgtttagctgctatcattattacttattttattcttaaaacagcttatgatatttttatagaatctgctttcagcttatcggatggtttcgatgattatcaattaaaacaatacgaaaaagctatattaacaattcctaaaatatccgctgtaaaatctcaacgtggacgtacttacggtagtaatatttaccttgatattgttctcgaaatgaaccctgatctctcagtctttgaaagtcatgccattaccgaaagagtggaaaaactactcagtgataaattttctgtatatgacatagatattcatgtagaacccgcttctatcccagaagacgaaattttcgataatgtttatcaaaaattatacaaaaacgaaaaaatcatcctagcaaaaattcccggttatgagacctttattagccctgacttttatatgattaatgaaaagggaaacattatcacttctgacatgctcactaatgctacaaatcattcattggcaagcaactttaaatatttcaatgtaaaatcaattagtcaaaaaacaaaacttgtgtcttatgaattggaaggtaaacgacatactagtatttggcgccgtaatgaaaaatggttcttaatctaccatcaaataactgccaagtcaagtccgtataaaacgagacgatatcaaatcacttcccttgattaatatactatttaatcagttactcttgataaaaatagcttacaaaaataaattaaaaagattgagaagaatctcggtctttttaatttgtttttatgtaaacgtttcatagccttgaaaattactttcagagtagtagactataatggaaggagtttttcatgaaattatacgttcaattaatggttattttaaccttttcattcgctggtgaggttctatctactatattcaacttacctgtaccaggcagtattattggattaatattactattcctagcgttaaaatacaaaatcatcaggctcaggcatattgatgccgtggggaattttctattagcaaatatgaccattttatttttaccaccagcagttggactgatggagcactttcaagacataaagccctatctttttgggatagctatcattatcttaggagcgctatttctcaatattctaactattggactggtatcccaatggatcaaaaagagatatgaaggagattatccagaaattggaggtaaaaatggcaactttaacgaataaccctatctttggtattatgttaaccgtatgggcgtattacattggcataaggatttttagaaaatatccttcccctgcaacaactccacttcttttggcgactattttattaattgcttttttaaaattaacacatatctcctataaagattactacaatggcggttcatttctaacgatgttaattacgccttcaacggttgtattggctattcctctctatagaacctttcatttaatgaagcatcacattaaaagcattagcattagcatcatcttagcttctgttatcaacacagtttttaccgcaatagttgctaagttttttggtatgaaatatttcttagcaatctcacttttcccaaagtccgtaactacagctatggccgttggaattacaagtaaagcaggtggattagctactatcactctggtcgtagttgttattacaggcatcttaacaagcgttttgggtcctatttttctaaaattattaaggatagaagatcctgttgctatagggctcgcgctaggaggaactgggcatgctataggaactggacaagccttaaaatatggccaagttcaaggcgccatggctggactagcaattggtatcacagggatttgctatgttattgtcagtcctttagttgcaggcttaatattgaaatgaggataaggaaagtaaacccaaaataattatgttataatatttaaaaatagaatttaggataaataattatgataccgttaaaaaaaataactgttggaacgattgtctgtctctcatttttgggtttaacagcatgctcttcttcaaatactcagcaaacctctacttcaaaatcaaatgtatcacaacataaaaatatcaaagctgaccacgaagaattacgtttgaaatttaataaagtaaagttaggggttaaagcaaataactttaaaggaggcactagtctcgctgaattaaaacaattatttggtggcgaaccaaatgaaaaatttgatacaccagcgggaaatgtcactcttaaaggctatcgttggaatgtcgatgatatctccatcactatacaattattaaacgatagtagcattgttcgttcaattagtaattttaagtttattcgtgatgccaacatcacaacaaaagattataatagtttaaaaaatggcatgtcatacaataaagtaaaagaacttctaggagaacctgatgatatttctcaagcagtttcttcagataaagaggaactacaggctgcatggattagtggcatccagtcgtcagacagtgatccgggaattaaccttacatttgaaaatgataaactcactaacaaacaacagcatggtttaaaataaaaaggcattaacgcctttttattaataccttaattacttattagaaatattttattacacaatggtttaatcttagtaccttaacttagccccttaatggtcatactaactaattatgatactaacttacacagatttcaaactaattcttccttatttgtcaaccctggttttacttatcagaaatgaggagaatcagtttgtgaggcaagattggagataaactaatataaagcctataacataaagctttatggagcatctattatccatcttaagggaatcgaacccctatcccaagaaccggaatcttgtgtgatatccattacactaaagatggtagtacatgttacattatagcatactttatcaacaaaaacaaaaagacttgctaaagcaagtcttttaattattataattcaatatcaccgaataagtcagccatagagaatccagtttgtgtttctggaagctcgtagtcgcgtttttcttgacgacgtggacgacgtggacgtgattgacgtttttcttctttttcaccttctgcttgcgctggacgctcttcaagagctttcattgaaagtgagacacgttctgcatctgaattaacttcaagaactttaacagtaacttcttgtcctgcagataatacgtctttaggattttcaacacgtttgtgtgaaatttgtgaaatgtgtacaagtccatcaatgccaggtaacacttcaacaaaagcaccaaagtcagtcaagcgttttactttaccttcaataacatcaccagcagcaagtttttgttcaacgccatcccatgggccaggtgtagttgctttaagtgaaagtgatacacgaccagcttcttcatcaattgaaagtactttaacttcaacttcttcaccaacagttacaactgatttaggtgaaacattgcgctcatgtgataattcagttacgtgtacaagtccatcaacaccaccaaggtcaatgaaagcaccaaagcttgttaaacgagcaactttaccagttacaactgaacctacttcaatgtttgagaaaacttctttacgtgctgcagctgctgattcttcaacaacttcacgacgtgaaaggatgaagcgattttctgctgcatcaacttctttgattttagcatcaaattcttgtccaacaaatttttcagtattacgtacaaaacgagtatcaatcattgaagctgggatgaaaccacgaagtccttcaaattcaactgaaagtccgcctttaacagcacgtgtacctttaacagtaacaacttcaccttcacgaccaacaagtttgtcccatgctttacgagcttccaagcgttttttagatacaaggaaagttactgtatcagtatctttacctacaacttgacgaagaacaagtacttcaactgtgtcgccagctttaacaaaatcattgatatcagcatcacgatcgttagtcaattcacgaagtgtcaagacaccttcaacaccagtaccatcgataacaacgtttgcttgaccgttatcaactgttaaaacttccgcagtgacaacgtcaccaggattcacttcgctaacactgtttagcaaatcttcaaattcattcattctaaaaaatcctccaacaaaagctagccgagctagcttttgataacaatatattttctcaaggtaacccgcaaggacaacaaatatctctttgacggtgtcaaacaaaagtttgatacctttgactggggtagctggattcgaaccaacgcatgagggagtcaaagtcccttgccttaccgcttggctataccccaaataatggaaagagagggattcgaacccccgaacccgaaggagcggatttacagtccgccgcgtttagcctcttcgctatctttccgtaacaacactgactattctaccacagatgttgttagcacgcaagctttttaaataaatattagcgattaagattatattcttcaataatatttcccatagcttgatctaaatttttatagaatccactcacttgctcacctttaatcacagcaaatttagaatctagctctgcaatttgacctacaattttttttccaataacgagttggtatccatcaaccttagttccattaactgttacttgagcgtctgaaatttgaatttcaattttcttatcttttttactcactattaactccaatatctctttttattgttttttattgtacacaaaatactaaaagcttgcaagagcaagcttttagtatagacttaatctactttataaatccacccttctggtgcttcaacatcaccaaactggatccctactaactcatcatatagtttgcgtgtcgctggaccaacttctgtctcactgtagaagacatggaagtcatctccgttttgaattcctccaattggtgaaataactgcggctgtaccacatgcgccagcttctgtgaatttatctaattcgtcgacaaagacatctccttcaatcgcttccataccaaacctttctttagcaaggtaaagcaatgaatatttagtaattgaaggtaaaattgaaggactcaaaggggtgataaactgattatctttagtaattccaaagaaattagctgctccaacctcttcaattttagtatgtgtcgctggatcaagatagataacatctgaaaattgtttctcatgagcatatttcccaggaagaagactagcagcatagttaccaccaacttttgcagctcctgtaccattcggtgctgctctatcatattctttggaaacaataaagttagttggtgttaaaccacctttaaaataactacctactggcattgcaaataccgtaaaaatatattcttcagcaggtttaactccaataatatctcccacaccaattaataagggacgaatgtataatgttgcccctgtaccatacggtggaacaaactcctcattagcgcgtacaacagatttaaccgctgcaataaatttgtctgtcggaacatgtggcattaaaagacgatctgctgttctttgaagtcgttctgcattttgatctggacgaaataactgaatagagccatctttagttctataagctttcaatccttcaaaagcttgttgcccataatggagagcaggtgaactttctgaaatatgtagcgttgcatcatctgtcaacttgccatcatcccatttcccatctttaaaatgcgaaatgtatcggaatggtaattttctgtaagcaaaacctaaattatcccaatctaaatttactgtcataaggtacctctttctttgggtttctaactattgtacgctattatcattattttttcaatattatttgtaaaattcagataaattaccaaactagtaaaaacacaaatgtgtttttacttaattttaactgagaatacttcttcgtcagaaatcttatcagatacaaaagagccattacttgtacgttcagaaaaactccattgacttaaatcaacatcgtaaacttttcctgttttagacataatctcaagtacgaaagtatctccttcatgattcgatactgaactaaataaatcaaattcaaaagatgaatcctctaaatatacaggtcctgctttaaaaacgcgatgcggtttggatttcaattcacgaagaacttgaagtcctcgattagcacgactagttgtggggataacatcaatggccattcgtttaagacttcctctatgagttaataaatataaacttgtggtgttagctataaatgcagatacgatgtgatcacgatcttttaaattcatcgcttttacacctgcggctttactaccgacgactggtacatcatttatactaaatctcaacgcataaccattataagtgacaagtataacatcctctaattggataggggcaacagtcacaacataatcctctacactttttaacttagcatatttagctgtttttgacttatatgtccgccatggactgatttcttgacgttcaaaacgctttatttgccctaagctagtgacagcaaaataagtttctttagtaaaatcatctactaattcagcataaataatttcttcatttgaagcaaagttaacaagattttgtgataaatgttcaccaacgtctttccatcgaatatcagctaattcatgaactggacgataagcaagattaccaaggttagtaaacatcaataaatgttgggtagtctttgcattgctcacaaatatcaattcgtcatcttctcgcttaccaagttcatcaacagttgatgcattgaaagagcgagggctggtgcgttttacatatccgcctctagtaacactgacgtatgtgtcctcttcgataattaaacttgcagtatcgatttcaatagtttcagctaattcttgaagttcagaacgtctagtattggcaaatttctttttgacctcacgtaactcacgtttcattacgttatacatcgtacgttcatcactaataattgccttaagcattgtgatttgttgacgaagttcttcttcttcttctctcaacgtcacaatatcagtatttgtgagacgatataattgcaatgtgacgatagcctctgcttgagcttctgaaaactcatagctgaccttcaaattctctttcgcatcagctttattctcagaagcacgaattaatgcaatcacttcatccaaaatagaaagaaccctaatcagtccctcaacaatatggagacgtttttcggctttttctttatcaaattttgaacgagcaataataatttctcttcggtgagcgatatagctagttaatattcttgatagacccacctgcttaggggtgtagtcatcaatagcaaccatattgaaattataattaacttgtaggtctgtatatttaaaaagataatttaagacaattgtttcatcggcttcttttttgagctcaatagcgatacgaagaccatctctatcagactcatcacgcacctctgctattcctggaactttattattaacacgaacatcatcgattcgttttactaaaactgacttattaacttcataaggaatttcagtaacaataatttgtttcttaccaccttttaaggtttcaatagcagttcgcgagcgaaccgctactctccccttaccagtctcatatgccttacgaatttcatcttttccttgaatgatagcgccagttggaaaatctggaccaggtagaaattccattaatttatctaatttagctttagggtgatcaatcatgtacacgacagcatcaatgacttctgctagattatgtggtggaatatctgtcgcatagcctgcagatattcctgttgctccgttgactaaaagattgggaaaggcagctggtaaaacagttggttctttctctgtatcatcaaaattccacgcaaagggtacggtattcttatcaatatcttgaagaagataaccagcaatttctgatagacgggcttccgtataacgcatagccgccgcaggatctccatccatagaaccattatttccgtgcatttcaatcaatgtctcacgatttttccaatcttgagacatacgaaccatcgcgtcatagatagaggaatccccatgaggatggaaattccccataacattaccgactgattttgcagatttgcgaaatcccttttcaaaagtattaccatctttattcattgaataaaggattcgacgttgaacaggttttaagccatcacgaatatccggcaacgcccgttcttgaatgatatacttagaatagcgcccaaaacgctctcccataatgtcctcaagggacatattttgaatattagacatatttttaattttctcctagttggagtggcttagtattatttttccacttatttgaaatgaatgattggctctcttgtctaacgcatacaatattacttgtacactataaaacatgaataaccaaggctctttattaaaatactgtattctcttctaaagtaaacttgacattatcttcaatccattggcgtcttggaggaactttatcacccatcaagacattaactcgacgttctgctcttgctaaatcttcaattgttacacgaattaatgtccttgtctcagggttcatagtggtttcccacaattgatcggcattcatttccccaagccctttatatcgttgtaatagtgagcctttaccaaatttttgtcgtaattcttctaactctatatccgtccaagcatactcaacaatttctttcttaccttttccttttgacattttatacaaaggtggcaaagcaatatagacatgtccctcttcaacaagaggtctcatatagcgataaaagaaagttaataatagtgtctgaatatgagctccgtcagtatcagcatcggtcataatgataattttatcataattaatatcgtcaagattaaaatcaggaccaacacctgcaccaatggtatggatcattgtattaatttcttcgttttttataatatcagccatctttgccttagctgtattcaatacttttcctcgcaacggtaaaatagcttgaaactttctatcacgaccttgcttagcagagccacctgcagagtctccttcgactaaatagagttcatttttcttagcattttttgattgtgcaggggttaattttccagaaagtagacctttatcttttttcgactttttcccattcctactttcatcacgtgctttacgtgcagcttcacgcgcatcacgtgcttttattgccttacggattaaattagatgctaaatctccattttccataagaaagtaagttaacttttcagaaacaataccatcaacaattggtcgtgctaagggacttcctagtttatctttagtttgaccttcaaattgcaagtgctcctcaggtacaagaatagataaaatggctgatagcccctcacgataatcagaaccttcaaggtttttatctttttctttaagaagtcctgttttacgtgcatagtcattcatagactttgtaatagctgatttcaagccagtttcatgtgttccaccatctttagtacgaacattattgacaaaagaaaggatattatctgaaaaaccatcattatactgcaaagcaacttcgatatgaaattcttgttcttcaccttcgaaaaacatgattggtgtcaacgtttctttatcttcatttaaatactctacaaaatcttgaacaccgttttcataatgaaattctagatgctctgcttcttctgaacgattatctgttaaggttaaagtaacattttttaagagaaaagcagattcctttaagcgctctgcaattgtattaaacttaaaatctatcgttgaaaatactgattgatctggcataaagctgacagaagttccagattttgattttggtgccgtgccaatttttttcagagttgtaacgggcttaccaccattttcaaaacgttgtctgtaaatagctccgtcgcgaatgatttcaacttctaaccaagaagacaaagcattaactacagatgatccaacaccatggagaccacctgatgttttataaccaccttgtccaaattttccacctgcatgaagcaccgtgaagatgacttcaacagtaggttttcccatagcatgcattccagttggcataccgcgtccatggtctgtaacagttatactcccatctttgttaataataacatcaatgcgatttccaaaacctgatagagcttcatcaactgcattatctacaatttcccacactaaatgatgtaaaccagttccatctgtggaaccgatatacatccctggacgcttacgaacagcatctaatccttctaagacttgaatagcatcgtcgccataattcgtcactgttatatcttgtttagccaaagtgacctccaaattttttcatcttttttatattacaagttttttgctgtttttgcaaaattatttttttaaaaatagcaaaaagacttttatgcttatgttataataagggtatgaatattataattatgattatcattgcctatctgttaggctctatccaaactggactttggattggtaaatatttttaccaagtcaatcttcgtcaacacggtagtggtaatactggcaccacgaataccttccgtattttaggtgtaaaagctggcattgtcactttgactattgacattttaaaagggactctagcaacacttattcctatcatattaggtataacgacagtatctccattttttatcggtttttttgctattataggtcacactttccctatttttgcacaattcaaaggtgggaaagccgttgctacaagcgctggggttttgctaggatttgcaccttcttttttcctttacttattagttatctttttattaacgctttatctttttagcatgatttccctatccagtattacagtagctgttgtaggtattcttagtgtcttaatttttccattagtaggctttatattaacggactacgactggatatttaccactgtggttatcttaatggccctaacgattattatccgacatcaggataatatcaaacgtattcgaaaaaggcaagaaaatttggttccgtttggcttaaacctaagtaaacaaaaaaataaataataaaaaaccgctagtagcggttttttattataaaactaacaatgtttcgagagtagatttcccttctaatttaaccaatcaatctcatttattccttcttcttctaagaaatgatttgttctagaaaaaggtctgctaccaaagaagccacgataagcagataagggactcggatgaggactctcaataatatgatgaataggattatcaattagcgactttttctttcgagcatagccaccccacagaataaagactactggtgtttccttttggttaaccactttgatgacagcatcagtaaaaggttcccatataagcccagcatgaccattagcttggtgttctggaactgttaaacaagcatttaatagcagcactccttgttgcgcccatgatgttaagtcatgatgtgaacgtgacccgatatcttctgctaattcttttagaatattttgaagtgaaggaggagctggtaaattgtctggaacagaaaatgagagtccttgagcttgttgaggtccatggtaaggatcttggccaataatcactacttttacgttttctagtggtgttatctgtatggcattgaacaccttatctcttggaggataaacgattccgctttcgtaaactgcatccataaatgtattaattttattgtagtaatgattgggtagttctctttttattaaatcatgccaactagaatgtttcatttataactccttacttttagatatctgtattactagtatagcaatattttataaaaaacgttactgctttattcattcaaagcagtaacgtttttttattaatcttcgtccttaagacctagagccaaatcagataaggacactggtctagaattttcttctttcaaagaagtatttataatgtttaaagaagtataaacatcaataaggattccaaatacatgtgcacgttcatcacctaaaattgcttgaaaaaccgtctgtgattgacagaattctaaaagattatctaagcccttaatccattcttctacaatagccagagccttattcataactttaaatgacgattcatcataccaataaatagaacgaatcagttttttttgcttactcaaagcttctattttagaaagtatctcacctagttcattctgcacaatagcaatagaaaaatgtttccccagtaaagatggggttttttctactaatataatttcatcacgaaacaaggttaaataatgaatactgactaacaatttttgaattagcgcttggtgatcgtgtgtttcagtttctctcatactcaaccatccttactatttctgactggtaaaactatacgtagcttactttaaatataccatatcactattgaaatcgcaaaaataagatgaataattttataaaataaatattataaggttttaacttcgtctacaaataattgatattgactttgtaacaaatcattagcctcttgagtaaaatgcaatccatcactagttaaatgataatttagattaccatcctttgataaaaatctattaatatctaacagtggaatctgattttgataacaaaattctgttagccattgattgattttctcaatatctgcattattgacagtttctctaaaaagggtgtaagcaatagttgtcaatctcatctttattttattctcagctaataatgagtagagtttttggaaattgctgaatatttcttccacactataacctgtaatgagatcatttacccctatagaaacaaaagcctctgttacattagctgtcaaaaagttaggtaagttttccaacatcgttgctaatgttacaccaccttgggaataattatggtaactttctagtgaggtagatatcgtttttgaatcacctaaaattatctttgaagcttctctattgaacaaacgactatagccttctttataaaaaactttattctctttttccctaatggcataatcgaaaaagaggtgaccgatgacgtggataaaatcatctctcgtatcaacatctaatgaaaattcctttgccatttgataagcatatgtcctagaggtgaaaaagcttttttcccttaagtaagtttctttattagaaataaaaatagcgccgttcggatagtataaaggttgtaaatcttggcgacgataacctttatctgctcccaccatatctatagcatagccttcatcagataatgttgtaaacagactagggtgtttctcaacttcagaaaaacttacaacattgtcaacatcatgtgaagaataatactccattgcttcctttatatgccatgattttcttagtggagaagttacttgaagtaacacaaactcctgattatcttcatagtcagataaaaaatcttttaacatatcatacgaagttgcctgatcagttgaaagttccggttttctcatcaccactgaaataccgcgttctaaacaaatctctctgtacaattctgaatctgtactaacaaaaatatctttcttatcaaacattccagattcaattgcagcatctatagtatggaaaatcatgggtttaccagataggaataacatattcttatctggtaatccttttgaccctgatcgcgcaggaataatacaaattggcttcataacatatcctttattttatttttttggctggaacccctacataggttccaggttctataatatcttttacaacaacagctcctgctccaattgtcgtacatgatgaaatatccaaggtttgaataataacactggcactacctacataaacttcttctctaatataacaaagaccatttatggtagcattaggtgctatattacagtgtgattctacaacagtatgatgttcaatgagcgctcctgtattaacaacattgttatcaaacagcttcactttagaacctataaaagccccaaaaccaataaagataccacgtccacaaatactatctggtgtcaatactaaagcattgggactaatgatgttaataataaagtcataataatcctttgctacatattcaaatagttctttccttttagcattatcacctattgtaataaatactgcatctattgagccatcttcaaggtaaggtagcacatcataaagttttccaagaacaggataaccatcatgctccgtaatatctttatcatcaaaaaaacctacgaaatcatacacaagaggatcaataaccggagcaatcgcatcagcatgacttcctgcgcctaaaaatgccaacttttttttcattttagattattctcctttaaatcataaaatggttgggaaattgaaggttcatctttcaaatacagctttattgcttcatatgcaatagatgaagcattctctttgtagtagggattgtcaaagttggtcacttcattcaattttgataatccctccaatacagaggaggtttcgactggtacacttactacactttctccatgtagcctacctttttggcgatcaccaatattaagagtaggtttcatcaaagaaggaacttctattaaaccagaagacgaattaccaatcagtcctagtgaatgacgaattaaggaatgataaagttgggttgataaagaagcaaagcaatgactattttcatgatttgtcaaataagtattgatagcctttgcaatatcatcagaaccagtatctgaattggatcctataaatagacactggacaccaaacttagaaagggctgatagtaccgctttcatctgctctccagcactttttccttgttcaaaagtaacaggatgatagagaacaacaaaataggattcctctagtgcaatacctaattgcttttctattgcttctttggttagagaagggattgatagagcattttccactccgagagctcctgtgttaattacaaattgaggttgttctcccatctgaatcacacgttgacgaaagtcctctgtagagactaagtgtaggtgactcatcttagtaattgcatggcgaatatactcatcaaaattgcctaatgaggtctcccctccatgaaggtggcatactgggacattataaatcaacgctacattcacaactggtaacatttcataacgatcccctaaaatgatgactagatcatagtcttccttgtcaaaaattttggtcaatcctagttgtaaatgcgccattgcagtagatacagttcttctgtcagtatcataaagatgtaagggaactttataagcaatatcaaaaccgtcttcttcaatttgacgataagtatagccgtacttttcttccagatgcattgctgttgcaataatttgtaagttgacttctttatcttttgacaatctttgaatcaatggcttcattattccgtattcagcacgcgatccggttactaaacaaatttttttcatcgtatcccttctatatatagtaattacataatcttagccgtgtaatacatctgttgccgattataattaggtgttattataactcgggcaattgattttcaaagcgtgaatcacgaataacttcatcctcttcgaaatcatcttgcgcttcttgtcccaagatgtcataccagttcataggagaaataccattacctgggcgcttcaccgtaatattttctattgaataaatatcgccttttttaattggttttaaagcaacgactgatttacgagcaacaatcttatttttttcttctactggatctgggattttttcaaatctacctaaggcttgttcaacaatgcgaacccctttaactaaagcagctaaaatatcaggtgttgcactggctttatgatccggaccttccatattagtatctaaagtaaagtgtttttcaataacttctgcacccattgctgctgctgcgataggtacttctgatccaattgaatgatccgaataacctatcgttaaatctttaaattcatctttcaaagtatgaataacgtttaaatttagagaggggtaaggtgttgggtactctgttgtacaatgtaaaatagaaatgtcggttgtaccattctgacgtaaaatattcaccgcttgatggatctcttccattaccgccatacccgtcgaaagaataactttcttttgttgcttgccaatcttttctaagtaaggtaaattagtgatttctcctgatggaattttgtaaattggcatatctgtagaaattaagaactctaatgactcttcatcaaaaggtgttgaaaaggtctccacaccttttgaaattgcataatcacgcatttctaagtattcttcaaagcttaactctaaacgtttcgtcatctcaagttgactgtctgctgttcctgtagttgctttttgatattcagctttgggagcaaatttagaaataagtttctcagctttaaaagtctgaaatttaacagcatcaacaccacaagacacggcaacatctaccatttttttcgcaagattaatatctccattatgattgcaaccaatctctgcaataatataaaccattatcttctccttctttttttacccaataagtctaaaatgactttttgaaaaacaatgctatatactataagaataattattcctaaactccatctaataacgatattacctaggaacatgttcattaacatagcataactaaatactataccacttaaaataatgtactgcctaactgagacatctgaataatggtatttaactttcgaaacaatatgatgaaaaatcaacaaggctaaataagatattattgtagccatagcagcgccataggctgcataatgaggaattaatacaaggtttagtaaccaatttacaccagcagctaataatgtcccaataggaatccatgtcgtattagcatagaagaattggatatttacaggaaatgtatagagaaagactaaaaaatagctgacaataattaaagaaataaattgaacactactactatacttgtctcctcccattatttgagctaactcaggaaaaacagtcaaataacctaatgttaagaaaactcctaaatagagataacggctaatataagttgaaagttgcagtaatttttcttttctagcatcaaaaaaccatggaatccaagccatattaatactattcaaaacaatctgaataatcattccaagcgaataaccgaaactatacattgcaacttctttagtactatataagcgagctagcataatcctatctaattgatttaataactgatgtcctaacaaatgaaaaatcaaaggaatagacacagtgacaatgaaccgaaaatacttaggattgtaaaaagatttgctatgataataaatataagcaaaggcaactattccagttattatagtaggaacaaaagctccaaaaaccctagataaaaagtcatcggaccaatgaaaaattaaaaatagagatagtgcaacagatgaaactgcattggctaaggatagtattaaattagccaagctcctctgttgttgtataaaatactgaccaaagaaagtcaccacatagttagcgtaactttgacacaccattaataaaaaaatagattcagaaaaaccaactaatggtgcaagaaaacttctaaatagaaaagctatcaaaagtacaataagaaaccatatattacctacagaaaaggcactcccagagtagcttttaaactcttctccatatttgactcgagccgaacttaaagaaccgctcgtctgaagaccaataaacagagtaataattcccatccaagcaacatataaactatattggccataaacttctgttgagatgactcgagtgtagatgggaagtgtgataaaggctaatccttgcaccaataaattcccgagtgtataaataaaaccagattgaagtaatttcttagtattcatttaatatccttcagatctactaaagttatttttttatcaacacaagttaaaaaatccagcgcggtggacgaatgtgttatcccaaattcgaaccgtcctgttaacatcaactctataatttccatagggatatttgatggtaatagctctaccggcaatttggaataatctactacatctctaggatgaacttttaaataaacattgtaccctaacgttctatattcctggacaatatcgtcaaaataatcgtattgctcttgaatactttgaaacctctctgtaggtgttttataacatttatcttgtgcaagtggctgtgtcaacaataatactgactttggagttatagttaatggttttgttttaaatattttgaaaatcagtgatttttgctctttgttaagactatcaaataatttttttctcggtagttctttatatttcttactccttatgtcatgaggtagccccactaaagaattaacctcaattgagagacaatattttgaaaaaccatacggaacatactttttaaataagtaagttttaattactcgttttacgacagaaccacccaagaataacttggcttgaaaacagttataaccatcttcaattagatgataatttttacccaaatacaccatatagcgacctattaaagtatcatcattaaatagatagacttgtgtatctactctctcaaagtagtgatttaagtctgaatctacaagctccatcacttcttcaatatttttactttgtaactgctcccgataagcaaactctttaactgcttccgtccttattccctgttcatttaatgtttttacccaagtttcataattcgtgatagtgtcacaaataaatattctagtattttctttatcttttaactttattatagtaatcagtaaatggtataaagtatgacacacaaaattattcatttatttatctttttctttcttttacaatttaatattttaaaatgcactacacaatactttaaataatactttatttttagtagcatacgttgtttttttataaaatcaaaaatagtttttttatattcagttttcagagtatgaaattccttataaaaattatttttatataactctatcaaatttacttccatagttttaattaaagctctctcactttgaaatactaagtctggatacttttctaataaataaattctttccttaagtgcttctacagcatgtagccttttaatattgtaggaaccagtcattatgctattttctctaatacgatatgcataagtattatatctaaagaaaattatatttttggctttcaaatataatttataggttaaaaattcatcttcgtgtaacttccctactggatagcacagcgtagaaaataattctctcttatataatttattatgtgctacagtaaaaatagctctataggcatcataattataaatattttgtattgcttgtactggactaatagtttctatcatttcatcttctaaaacgatatttataatatgttgttctcttttttcaacataacaccctaaaacaatttctgaattatatttctcgctaaattcaaccattctctcgattgcatcttctttatatagataatcatccgaatcaagtaaataaatataatcgccagtagctctactaattccataattacgagcatctgataaaccaccattatttttgtgaaaaacgaatatacgcccatctatttctgaataataatcacagatatccccggaattatctgtagagccatcgttaactagaataatttctaaatttgaataagtttgagctaaaacactttctatacactcgtttaggaaagattgaacgttataaactgggataatgatactaactttatccattccttgataacctcaaattatatatttttcttacaatagtgaaatatcttatagaggaaataaataatatatatttaaccttctccttcacactaatcctattattaaagagaatagtcttaaaatattttctatatttttttctgtaataatcaactgtatcatataatttaaaatcaatcatcttcccacatatatctattccaccaaatacttcattatatattacagcagagattaaagatgtattatgtggaaaatttagatttataaatacaatattattttgaattgcctcaaaaaaatacaacattctctcattgaattttgtcctagtagtactattatcgctaaaatacaccactgcagtgacaatatcacaaactgctatttttgaagcgcaagatataagcttaaaagttgtatccatatcttcatgaatttttccttctggatatggattactcaataaattacttctcggatataattttgctaacggggaaactccataagttttcccataatacatttcttccaacgccacctctaaagtataaagtttaatctcttttaaatactgtgaattaatactagtattgtaagtattgttgaagttaccaatactagttaaaacaatatcggcattggtagctttctgtatgttgtacataacctcaattgaataaggaagataaacatcatcactgtctaaaaaagcaatccaatctcctgtacacctaagtactccgttgttacgtgcaactgattggcctctgttttcttgatagaaatattttattcgcctgtcttccaaaaaatacttttcgcaaatatcccctgtgcgatcactagagccatcatcaattatgataatctctaaattctgataagtttgctcaagaatactatctagacatctcccaatatatatttctccattatatacaggcactattattgaaattaattccattctttactcgctctttttaaaccttgctaccttccaaagatagctaaaacccaacaaaattttccacccagcctcttcactctttagtgtaggtattacccctaaagtagtcattttcaaagcctgtatgttcatttttatctttatagctgaccaccagcgatcaaatatattaggaaaagacattacatacatatatgaattttctaatgaaaaaatagtccctttgaaattttttctccataatttaaaaatattagaagtcaaaccatcttctaagtagtcaaaacaatagattttcctattttggggacaaaagtatcccttttttgataaatatatatacattatttcttctgataagaaattctccccttcgaaacaaggaaattcgaaatctactaaataagcattattaataacaatacaagtttcaatttttaagtgatatttatattttaaatcaggaatattaacttctaatattttgggattcaaccaattattaccttggtttaatgaatatcgaggataaacaaggcctacatatctattagacaacgttaggctctctaaatctttaaaaataatttcaactgcatcttctaataaccaatcatcactatctacacatacatgataatcacttggttgcatatatctcattgctagattataggctgaatgcttaccgccattacgtttatacagatatacaatactaactttattctcttttatataattacttacaatttccttagtactgtcctcagaaccatcatcaacaatcaaccatataaaatttttatttgtctgattacatagagaatcatacagataggataatcggtagcctctgttaaatgtaggagtaaaaatatataacatttcgtcctttctattacaataataactatttctttaactttagaaaccttagaagcattctataagtaccatatccaaataaaaaatcaattatgagccttactctaatctttagagaatctgaaataaatgaagaacttttccaacttccttcgtaatgatgtatagaataggtaacactagtcagacaatcaaccttacctgttaataaattctttggattaaaataatttctcggatatattgttatatcatcaatcttttgaataatattcttattcttaagccctctgtttatcaataaattagttgtaacctctacacatgtcttattaagagaagttaaatcacttttgtcatatatagacatatttgattttaaaaagtgatgtcctttaacagcgccaattattaatcctgtattcacatcacaactaatctcccttgctagaaaacactcatgaatcctcaaaggatctaaactttttaaaagctccacatcagtatctagatagaaccccccataagtataaataatatccaatcttgcatagtcagaaacataagcaaaattcttcttagtatatgcttctctcataaaaacatttttactaacatcataattatgctcattccattcaataatttcataatccggacattgttctctccaagtttttatatatttctttaaattatctggtaagggatttcctccaaaccaacaataatgtataactttaggtatcattttccttccttacctcctgccatatcagagcaaatatgtcatatattattcacaatagtaaattccttttttataggttcgataccatcacaaaatattttaccaaaaactagccaactaatattcattaccacactgggataaaaactttcagtaaataatattatagacattataaataggagtagttgaagttcaattatgattatctttttactatagatataatagattatcatacaaaacatggtaagtactacaccatacatactcaataacatagagtagctattatcaaataggacacttgtttccttaaaactatttccaaaaggagttaaaccatctacaagttgtaaatgagcatagtgtaatctacctgttaaaagaacatctaatttttgaacaaaatttgaattaaaaaaaattgtagaactcaaaaaggtaaatactaataaaaaaaattgtacatagggtgctaatttcataaatactctttttattaagctattctttgtcacataaatgagtacaataaataaaattacgatataataccctgtccttgaaaaagtatattggtacaataaataatttaatgttaaaaataaaaccatcacaacaggctttagtcgtttataattgagtacaatatacaagaaaatagttagagcaaaaaaattatgaataaagttaggatgaccaaaacctaagtcacttctcagaataaattgtccatccctataaaaattgacatacttaatttctattaaatctaatttcacaaaaatttgatttaatagaactcccaaaatacgcgatcctattattatagagaaagctttttttagagagatgtcctttaatgctagaaaaaaaattaaagttaatataaaagtaaccttatgaacaaagaataaattcaaaatggtcgcgataaataataaaaagatgatcacgagttttcttctttcaaaataaaggctatctaataaaaattttattccacacagtaaaattgcaactaacatcactattttgtaagctgagtttccctcgcctaaacccagtgatttaaaaaaattaactaaaaatattgcaatataaaataaagagtttttattgattttcatcgcacaactcctttaatattaccttaaattcttcaataaaattactactattagtttctaaaaacggacgattcatcattccctcatagactacattttgtaacctttcaatatctacaacgatatcaaaattatacattgtttttaccttattaacaaagtccacctgatgattattcacatgctctccaaactgttcttgtctaggaaccacaatagttttttttcctttagaaactgcattcataaacgtcgctgggccgccatgtgtgataacaatctcagcttctttcatgtaagagttcatatcatcatatgagagaaattttgaccactgacaattctgaggttcaaagtctgagtaacccgtttgaatgaacacttcttgatcaatagcacctgtcccttttaatctatcaacttctttaataagacggttgaactgctgttcatgtgtccccactgtgacaaaaatcattaaaaaattcctcctaaattaattgccttaggataaacttttttcatttcttcccactgaacaataaatttatctgttacaggatacactaattttcctgtcaaagttggtttatccatcctgtcgaaaacctctatgtaaacggtcttacaaccaaataacttaccaatataaaagaatggtactgctacagcggcaccagatgatatgataacatctggtctttcttttctaaggaccttaaaagctagaatagtattttttaccaagtttttgacattacggtttgttggaaagaagcaatgatatacaatctcttctcttagaatactcctagcatcttctttatcaaaggttacccaaaacctatcttctttttcccaaatgggtttcaaaaggttcaagtgtgctagatgaccaccacttgaaccaaccagacaaattttcattatattcctttcaaaccttacctttacttagctcctgtcccgagtaaaactacctttagtgttaggagaataatcttaatatctgaccaaatagaccattcattgatatattgaacatctaactttacgatttcatcaaaatcagtaatattatttctaccagatatttgccacaaaccagtgattcctggcttaaaactaaggcgtcgcttctgcgttgaattatacttttcatattcatcaactgtgggagggcgtgttcctactaaactcatatcaccctttaaaacattatagaattgaggcaactcatctatgcttgtttttcgaataaattttcctattttagtaattctaggatcatcgtctaacttaaacattagccctgtcatttgattgtgaactaataaatctttcttaatttgttctgcatctactcgcattgatctgaatttatagaatctaaaaatcctaccattacgacctactctattttgagaaaagatagccggtccaccatcttttctgatttgtggaactagaaaaattgccacaatgccacatatgagcaaacctataatagcacccgtgatatccaaaaatcgttttgctataaggtgactatatttatagaatttcatagaatatgtaataacactatatccttcaaaagtttggattcgcttttctcctatattatcaaagctaagtgcctctacattaacattgacaatcactcccattgcttcaatgtcattaataatatcttgtatttggtatttaccaaataattcaatgggtatgttaataaaagcttgatcaacagttaagcaggttaactctgaagtaagagcatctttgtttattatccttaacgagttatgtttcaaatcataacaatccttttcagaggaatccaagatacagacagcgatataattatggtcgtatttattcctaaaggtcatttttgataaagaatccttattcgttatcaaaacaactttggtatctcgtgaaaacttagcgtaagaatattttcgataatattttaaaaatgaattcaatagatataataaaatcgaattcatagcaataaaagtaaaaaaggaaagtcgtgtcgttgtaaaagagtttttaaaaataaaaaataatgaacttgatatgaaaatatagtaaaagctgtatttcaataccattttaaactcttcaagatagccacgactccaaaagtctctgtaaaaatcagaaagataaaagacaatataatgtatcaatagaacaaacaataaatctttattgcttttaaaattgggagtaattaatgttaatgtcaaacttgcagaaaaataaaccacaactgtttgaatcatcgctataataatcttttgtatattttctttttctttcaatacaagagccccttacttcctttttctatccctttttccgtaatttccataatcgccgtaagtagcaacagattcattaactttattaagaataatacctaagaactttgaaccactttgttccatctgttcttttgctttttcaacataattacgttttattctgcctgcttgggttactaaaataaaaccatcgcaagcattagcgattattgcggcatcaacaactaaaccaataggtggagtatcgatgataatataatcaaatatatttttaatagcttcaatcatcttattaaaataagcgttctgaagtaatgctgttggatttggtggtactttccctgaaggaacgaccatcagtctaggaacattggtttcacagataatatctccaagatctgcattacctgataaataattcgtcaagcctttaatagttccagttgctttaaaggttccagacataacagagttcctagtatccgcatcaattaataatgttttaaatcctgcttgagctaaagataaagctaaacttgttgaagcagtggattttccttccccttccctaacagaggtaattgcaagaattttattttcctttccactaaactgtatgtttgtacggatcgcattgaagtattcttctgttttttttgcttgtcttaacttgctatcaactatttctaaacgagtcattatattctccttaaagtttattcaaatctggtactatacctaaagaagtaagtcctaggaccttttcaatatcttcttcagtattaacacgatcatccaaaatacccataataactaaaacaatagttgataatcctgcaccaacaataaacccgattagtacattctttttaatattaggagaagatggtgctttaggtaaatttcccttctcaagagtagtgatatcctctacttgagtaactgccttgatttttgaaactgctgcttctctaactgaatttgctaatttttgagacatttttggattagcatcttcgaccgatattgaaataacacgtgtatcttttaaaatagaaactgttattttttgcaacaactgagacgaaggataattcaatttttcagaagaaataactttttctagaacgtcagtagacgtaataatctccttatagtcatttgcaagaaaactccccgcttgtagatcttgtgcagtaatactattattaggggtattagggttaatgacatatatccttgttgaagaagtatattgtggcgtaacaataaaaagactatagaaaagtccagctgttgcaaatgcaatggcaacaaatgtgattaaaaatttctttttccacaatttttttaaaaggttgaatatatttatttcaacttctgtattagctattttattcatgaaatctcctaaatgtaatggttttttaatatagattgagcattttcaataaaaagttggttagcacgttctttaccgaaatctctacagataatcttataagcttctgctaaaaatggcggtctaacatcaaggttatgcatatcactcgctacaaaatgcactaaattttcctctaaaaaataacgggctcttttcttaaagcgtttatgcttatcattaaaaagtttttgtttcaaaatatgggaactatttatttgtgtgtaacaccccatattaataatttccttcacccgttctttttgattctctaaagcgttatacctctctatatgcgcaacgactggtgtaataccaagcattaaaacatttgacaaagctgtatgaatatctttccaagaagtttgcatagaaaattcaattaaagcaaatttcgtattgtttaaagttggaatttgctttaacttcagtttttctaacatatcacttgtatagtacaattctccaccatataagatttgaagatgttcaaatcttttttccgcttcgtgtttaactatagaaaagtttttgaagataatatcttcaggtgtttcaaacataccttttcttctatgtgatgtcgaaacaattattctaacaccttgtcgataactttcttctattaaagataaactctcttcaagcgttttaggcccatcatctacatcaaaaacgatatgagaatgaatatcaatcattcttgttattcctccattgtgttcttaatttttgattttgcattagataagctagattgatcaattgacatcatataaagttgagctcctggcattgcatatgaagggagttcacccgttgaaccatgaccagttaatgcttgtgactcgacagtgaagcgttgtccagttgacaattgattgttaatcaaatcattaatgttatcaatagtcatattagtttgaacggacgtttggagctgtgaggtaatgctatttaattttgttactgactgactagaagctaacttatttataatagctgcaatcactttttcttgatttctacctctatcgttatcgcctccttgtagagaataacgttctctaacaaagcccaaagcctgctcagaattcaatgttacttgaccaacagggaagtcaaaattaccatgtttacttgtaaaagcttgatcgttataaactgtcactcctcccaagaggtctattaattttaaaaatgatgaaaaattaattctagcataataatcaaggttgatgtcgtaaaggttttcaagtgttttcattgatgtctcaacgccatacaaacctgcatgggttaatttatcatattgattgcccccaccatctggaatttttacataggcatctcgtggtgttgtcgttaacaatactttgtgggtattggtattaaccgtcataataatatttacatcagatcttgatactgttgatatagagccaaaagtatcaataccgctaatatagatattaaataccccttctttatgattagtatttttacgattaatttttttcttaattttgtaagtataaatcgtttttatctgcgatttaaaatcaggggtgctaagttcaattaagctaacataagcattatttaaaaccatagcctgactatcaccacttttaattctattgtatgcatcctggtaagaatctgttttttgtggtgtaatagagattcctttttctgattttatatgttctatcaaatcagtaatatttgaagtatcgtttttaactggtgcggctaatttgctgacagcttctatattggttattttagaatcttttggtacaactacactcatctcaatttcagagtatgaagcagttttatttagattatttgtcaaatcaatggttgacttaaatccatataaagtagtagcaacgaaaatagaagctaatactaaaattatagttgtaaaaattctagctttattcttaatacaaagaaataaacttactaaaatgattaaaacaattacaactccataaatgacgttcaggtgtctaaatgccaaaaaatggtgacgatacataagaaataatgagactacacttaacaaaataaaaatcaccaaaagaaataaattaatcacccgtagaggtgtatgtgagtgtttcttttggtgacggcgcgaatgattagacattgtaattctccaatacttaaaaaaaccttaattttacttggatattatatcatttttcaatacaatattcaacgaaagtaatatggaataatctgattatattagctaaataacattttcaattgatctatattgataatttagctgatctaattgaatttatttacattctagtttaaactagagttatgagaattcaacaattacaatatgttattaagattgtagaaactggtagcatgaatgaagccgctaaacaactctacattacccaaccttcactttcaaacgctgttaggaaccttgagactgagatgggtatccaaatttttattcgaaatccaaaaggaataacgttaacaaaagatggtatggaatttctgtcatatgcgcgacaaattctagaacaaacagcacttcttgaagagcgttataagggtgataatacaagtcgtgagctgttcagcgtttcttcacaacactatgcatttgtggttaacgcttttgtagctctctttaatggcacagacatgacccaatacgaactttttttacgtgaaactaggacttgggaaattattgatgatgttaaaaatttccgttcagagattggtgttctgtttcttaatagctataatagagatgtattaaccaaattattcgacgataattccttaattgccacaactctttttactactacacctcatattttcgtgagcaaatccaatcccttagctaatagaaaaaaattaaatatgaaagatttagaagattatccttatctgagttatgatcaaggcctgcataattctttctacttttctgaggaaatgatgtctcaaattcctcacccaaaatccattgttgtcagtgatagagcaactctgtttaatttaatgattggattagatggttatacagtggcaactggtatcctcaactcaaaattgaacggtgacgaaattgtcgcaatccctcttgacgtggatgatgttattgatattgtctatatccgacacgacaaagcaaacctttcaaaaatgggacaaaaatttattgactatttattagaggaagtttcgtttaatcataaaaataaacagtcctgagattgtctcagaactgtttttaaattactcaagtatatttataataagcttgttaaccgtatcgtagtgaaaattaacagtatcatactcaacaccaattacctttgccaagaagataatctggtctaaaaatgcttgagaagaaaattgagttgtacgatatagttcttgctcatcaaaaggtttaatcaggtgagccaaaggatttctgactgatttttcgaactgtcttaattgaatgatggtcgatttcacttcttcatcaaggtcggttaattgtaaacattctgccaggcttttagaagtcaagcgactatcgtgccacctttcagagaatgccaaaaggactgggtggtttgactcctttaattctttaaacttccaagtatcgtagtgatcatctcttgcattatggatgtaatcatgcaagtgaggtacttcttgtgcaagtaaaatcataaatagacgatataaaataggactaacactacggacaaaatctatgattaatccgttttttacttttgcttctaaatccatgatgtaatttgccagcaactctaaatcatacgggttatgcaaaagctttatattgtatttttcttgtaatataacaacttgttcttgatgagcaaaaagaaaatcaatgtttaactctcgacgctctttcatcatttccaataaaaataataaatctgagtttaaaggaccatgtttttgtaataataagaaagcattatgataagaatactgatccactaatactttaagagcagttgaaaaatctgtcatttctatcctcattcagaaataagtgtttcgagcccaactttcatcatatcagtaaatgttgtttgacgctcttctgcacttgtatcttcttctggattattcaagttatctgaaatcgtcatcatagcaagagcattaacattgtgttgagctgcaagatagtagagagctgctgcttccatctcaatagcatgaacacctagtttacccaaggccatattacgatctggttggtttgaataaaacacgtctgaagataatacactgcctacatgagttgtaatatccatttcctttgcgatgtgataagctttatccaaaagtttaaaatcagcaatttgcggaaaatcaaattcaggccaatcattacggataatattagaatttgttgctgctgcttgtgccaaaacaagttcacgaacatggatatcaggattaatagcacctgctgttcctacgcgaatcaatgttttaaccccataatcaacaattagttcgcgagcataaattgaaattgaaggcatacccataccagttcccataacagaaacacgatgtcctttataggtacctgtataaccaaacatattgcgaactgtgttaaaacacaccgcatcttctaaaaaattctcggcaataaatttcgcacggagtggatctcctggaagtaaaattttatctgcaatttcaccttgttttgcttcaatatggattgacatataaactcctcatttttcttataaaataatcataggcagtagcaaaaagtactgctatagttaggggaacaatagttataacagattgaccagtaaaagatatgactaaaccgacagctgtcagtggcgctctcattgtaatagctaaaaaaatagctgcaccaaccaacatactggttactatcgatatgtggggaagtaaaggaatagaaatactagctaacaaaaaacctaaacaagcaccaatggaaaaagatggtgtcagtataccgccataagcaccagcgtaaagagtggataatgttgctatcatcttgagaacaactaaaatagcgattaagctaactgtggtccctttaaagacttcttgaactagggcattaccatttcctaaaatctggggatagacgattgataaaacagatactatcaatgacactactggcaaacttaacaatatttttatatttttaatacgtctctctgtcactttttgatttaaatatctaaagctaatcgcaatcggagttacacataaaacgatcaagaacataaaagctaatgactgtgaattcagactcatctttgaaatatgataaagaggggctgtcgaaataactaattgagcaatactagctgcaccaaaagtagaggctagcaatgtcacaatatttttcagtgagattcctaaagctaaagtttcaaaagcaaagaatacactagctagggggacttgataaactgctgacaaacctgcagctgcaccactaatgattaataaacgtttatccagcactttaagtgctaataaatccgatattttcccagcatttatggctccaaactctcgtggcgctccttcttttccaatagggccaccagttcctacataaatcaattgcaaaaatgcgtgacctatatgtagccagtaaggtgatttttttacagaaaaatccttaaaaacaacctgttgtttaatactagttatttgctttggtttgatttgtaagtaataccaactaagggatgctaaaaaggagactaaagtaagtgataacactcttttaattggtgtgacactatttaacaaagacagagtattttctctactatcaccaaatgctaaccactctgtaaacattaatacatagtgcattaagatagctccaactcctgccataactgtcataaatagaacggctatcataaacttgacagcatagtataatcgagaaaccattttaaagttcagcaactaatgatttaactaatcccttgaaatcttctttaatacgctgagtaacttcaacgacctcctcatgattgagctcagattggaagccagcggcaaagttagtaattgctgaaattcctaacactttaagccctgagtgagctgcaacgatcacctctggaaccgtggacatacctaccgcctgtgcgcccattgtttggaatgcacgaatttctgcaggtgtttcataagtgggtcctgatacacccaagtacacaccttcttcgagtttgatattctgtttttcagcaatttggtgagctttttgtcgatatgttgctgtataagcatccgacatgtctgggaaacgtggtccaaattcttcaaggttctcacctatgagagggttagtcccaatcatattgatgtggtctttgatcagcattaaagttcctggtccgtatccaatcccacccgctgcattagtcacaagcacactgtggcaagccaatgctctcatgatacgtactgggaaagtaacgacttccattgtatttccttcataaaagtgaaaacgaccttgaagtgctaataccttacggcctgataaatccccatacactaattttccagcatgaccaactactgttgactgtccccaatttgggatgtctgcataatccacaacaatgggattttcgatttcttcagctaattctcctaaaccagagcctaaaataaggccaaattctggtgctgtgacgccttttgcttgcaaaaagtctctagtctcattaattttttctaataatgtcatttacttacctcctaaaccattattcactatacaatatgctataaactttggataatctgtccatcttctttaacaaaatctttttccatctttacaggtaaaatggttaaaattgcttcacagggtcggcagagttttgcacctttactcgtaacaactatgggacgattgataagaataggatcttgtatcatcgcatcaatcatttcttcatctgtaacgctagaagattccaaattgaatttctcataagcaggaacatctgttcttagaagttccctcgcagaaagtttcatttctaacaacagttcaaccagttccatcctgctaggtggtgttttcagataataaataatttctggttcaataccacaatgacgaataatggcaagtacgttccttgatgtcccacaatttgggttatggtaaatcctaattttttccatcatcttcctctcaatttttaatgctacaagtgtcttaaggaaataaaaatttataccaagtcctgcaagaagctctctccaatcatcgcagtatcaacaccaaagttatccgcaactgttgctgaaatatctgcgaaatgccctactgggataaggccgtttcctgtgaaagatgggctataggctaagagaggaatgtattctcttgtatggtctgtacctgcataagttgggtcattaccatgatcggcagtgatcaaaagtaagtctttgtcacgcatcgctgaaatgatctctggaagacgctcatcaaactcatgaagacaatcacgataaccatgaggatcacgacggtgaccatagagagcatcaaagtcaaccaaattagtaaaggagaagcctttttcaaactctgataaccccattgtttttatcaaagtatcaataccatgactatttgatttgttatgtcccatatcatgattaatgcctgaaccattgaaaatatcattgattttaccaacagcataagtatcgatgccagcttgatctagtttatttaatacggtatcttcaaatggtgatactgcatagtcgtgacggttggctgtacgcgtaaagttgcctggttcacctacatatggacgagcgataatacgaccaaggagagctggacgctccattgtgatactacgagcatattcacaaatacggtagagttcttctagaggaatgatatcctcatgagctgcaatttgtaggactggatcagctgaggtatagatgatgagctcaccagtttccatttggcgtggtccgaagtcatcaataacagctgtccctgaataaggtttattcgcttcacgaataactttacgtcctgaaaaatcctcaatctttgtaataatatcttctggaaaaccattccagaaagtatcaaatggctctgtaatatttaagcccatgatctcccaatgccctgtcattgtatctttaccaagtgatacttcttgtaacttcgtcgcgtagccacttggattttcttctgcagggacggtcttaagcgcttggggacgaggaatattaccaagtccgattttagccatgtttggcaccgcaagtccaactgtttttgaaatgtggccaagcgtgtctgaagcaccatcaggaactcctgcattgacaaaatcattggcatctggtgccgctccaatccccactgaatctaagacaactaagtgaatgcgatcaaattgtgacattatatcttctttctaaggaggttacggttagctcctaaaaccgattatttaaataactatttttcaagtatgtcaagaccgtttttgcctgctactataactttattaaccataccattaaataaaccatgttcaacaacaccaactgtatggtcaagttcattcgctaactgctttggatcctctatttttttcaaatctaggtcgataatgtagttccccatatcagtgataaagcggtcaccttctgtttcacggaaagaaggacaataaccttttgatttaaaaacccgaaaaagacgctcagaaccatatctaacaacctcaacaggcaatttaaatgcacctaacgtttcaacaagtttgctctcatcgacaacccagatatattctttagttggagtagctactattttttccatgagcagcgcaccaccgccacccttgataccattaaaatcagggtctacttcatctgctccatccacagtgacatcaatgacatcaatatcatctgctgatttcaacggaatacctaatcctcttgcctgctcagtcgtacggtttgacgttgtaacgcctacgacttgcaatccctcttctttgacacggcgtccaatttcttcaacaaaaaaatatgctgtagaacctgtccctaaacctacaatcataccgtttttaacgtattttgcagcggtcactccagcaagtttttttagttcgtccatattttccccttttaagttaatgttgtctaatatttttgataagtctattcaaaacactatctcaagacacattataccattttttaagtgatttttgaaaacattttctttgttctttatgcattttagttagtagcgatagtcaaattctttatttttaataatctattgctaacgcacttatatcacctaaaataagtattcaaacaaaaaagatgagtttcttagctcatctttttatgcatataagttttttagcgtttgaatatcaacttcttgaatgccataatgcgaaccttttgactgcataacggaatgttgttgatcattatgtcctagacctaacgcatgtcctaattcatgttcggccgtattaacaatcctagtatggtcataaccaaactgtttattcttaaggtaaaatgtgtttaattcaactgttacctttgaaatacgattagttaaagcatttttctcggtttcagctacacccgcagcttgtgttttagcatctgagtaatccttagcaataatatcagcattaggattatctgttgtttgtaacacaaaagcacctgttgcattccaattggagattgcttgcttgtaagcagagaccaactcagaatctctagttgctatatagatagttgcctgatttttatcccatctggtattttctgaatgatgaacattatccgtagctagattagtaaaggaatttttgagctgattagtgtcagcaaaatttaaaaatgtttttcctgtctgaataatgtcactaagttgattagcaaattctgattgactgtgattcgcatagtaatacaagccaaataaaataatcgcaataacaagaactgtcttgaatattccccaaatgatattccaaatcaatctaaagataaactttggaatagcaaatatcattctaaatagtgttctcattttttatctcaccttctgtgtctaatttcccaaaacttaatgatttagtataacaagactttacttggatttcaacgatttagctaatactaagaaaggcgctcttctttgacataatcaacagggagccattctaagactttttctaattgttgattccagtaataccattcatgtttaccatgatcattgaaatagtcaatagttaaacctaattgacgaagttcatcaattgcgacttcattagcttcaaaaagaaaatcttcataaccacaccatgcataaaatttagtcttcatatcaaaagactcaacgtaacgccttagtgaatgacgctctatgttatcagtgttattcaaatcgccaaaaattcccgaccaatagttaatgttattgttgccattattgaataataaatcaaagtcaaaagaaagtgcacctgacaaagaggcagcatgagaaaaacgattagtcagtagagctattttatatgctccatatccccccatagataatccggcaatgaaatttttctctctcttatcagacatattaggaaagaaacgtttcaaaacttttggtaactcgatagctattgcatcaaaataatccaacccatactttgtgttggtataccatgctaagtctgttgatggcatcacgacgataagattagtatgacgtaaaagacgctctatatttgtgcgtttttgccaagaattctcatttccccccattccatggagaagatacaaaacaggaatgtcacaatcatcaattttatcatcagacatctcaaaagcatctgggtaaataacattgacttgacgttccgttcctagtaccttagagtgatattcaatattaaaaaatgccataaaaacctccattctagcaagaaaggctaccaaaatttggtaacctcttaacactatcaacgaacttccataaccacaggaaggattgctgggcgacgtttcgtttggtcaaataagaacttgctgacctcatcacgcactttccctttaagttcaccccagtcaaatgtatctttacttaagtaatcttctaccgttgtattaactaattctgcgctctcacgcaaaatatctctgctttttttcacatacacaaaaccacgcgtattaacacgagctttagaaataattttcttttcttttttgctgacagttataacaacaataaaaattccatcttcagataataccttgcggtcacgaagtacaatattaccaacgtcaccaatagcatttccatcaatcataacatctccagcaggaacagatccactatggaagaagccatctttttcaagaaccatgatgtcaccacgcttcacaatataaatatcatctgctgacattcctacctcttgagctaagcccgcatgtgctgacaaatccctatactctccttgaattgggaaaaggtatttaggtttcaatagattcattaataattgtaattcgcgaccatttgcatgacctgatacgcgcaaattctgtgttatcaatttaactgagccaccagctttataaatcagattttcaacacgcgctacaactgcctcttttgcaatacttggtgttgttacgataaatactaaatcaccatctttaatttgaacataacgatgacgtccgatcgccattttttggagaccatttatcggctctcccatacgtccagtttcaaggattaataattcgttatcttcgtaacgtgtcatatctttaggtttgataatcatattttcatcagcaatatgaatgcgtttcatacgaatggccgtacgaacaatattttcaatatcaaaacccgttaaaactactcgacgaccgttttctgccgctgcatcaaagacttgttgaatacgaatgagattacttgcaactgccgctacgatgactctaccttctgcgtcttcaataacgctcttaatttcatcaccgacctcatattcgctagcaacttgctcattgcttgtagcatttgcagaatctgataaaagtgctaaaacaccatcacgaccaatttcagctaaacgcgccagatctgtttggtaatatttccttgcagcttgatcaaatttaaagtcacctgtgtaaacgatatttccctcttttgtcccaataacaattcccattgactctggaattgaatgagtcgttttaaagaacgaaatcaccgcatcttgaaattcaatttccgtttcactatcaatcacatggaaattattgaatttcttgactgctgtactatttttaacgaataacttagctaattcaattgtgagaggtgagccaaacacaggtgctttgacttcggcgataatataaggcaatgcaccaatagcatccgcatgtccatgggttaagaaaatcccctgaacacgttttttattttcaattaagtaatcaagatttggaataacaacatcaacacccagttgttcattttcaggatatttgagtccagcatccaaaacaaagatagaatcattgacttctactacatataggttttttccgttttcacgaacacctccaagagccatgatttttatgtcgctcataatgagttttctccttaaattttgttaattctttttataaagcagacaagaaattgtccaattattatcattagtaattgatttatcggtaacttttcttgggtttgaagaaaaaccttattaatcaataataggaatatgaattaaagagtgtgtccttattttcatcccatttgtacttacggtccttgtctctacaagtcgatttacagcattattagtatatcatattttgaaaataatttcttgcaaagtgtatagaaaaagaagtgaaacacttccatttcacttctttttaatcaaataattgataatagtcagctatagccatcttgtttttttgtgcctgatttaaatctctgacaatcttgccatctttcattactaatacacgatttccatatttgagagcatcttccatatgatgtgtaatcattaaggcagtcaacgaatcttgtttgataaactcatcagtcaagcccataagcgaaacacttgttctaggatcaagcgctgctgtgtgttcgtccaataataacagatttggttttttcaaagttgccattaataaactaagcgcttgtctttgtccacctgataataaacctgtaggtgtctctaaatggcgatcaagtccattaccagttctagcaatcaatttttgaaattcttccgtatagttaataatctttctaggaactagcggtctcttttcacctcgaaatttagcaactaataaattttcagcaactgtcatcctaggtgctgttcccattttcggatcttgaaatacccgtgataaatatttagctcgtttttctgctgataaattagtaacatcttgtcccatgatgtaaatatttccactgcttaacatcaaggtacctgcaattacattaaaaagcgttgattttccagctccatttccacccaatattgtaatgaagtcatgttcataaatactcaaattaacatgatctaatatcgttttcatttctgctaaaccattactgacttgtacggttgcttcttttaactctatgattttcatcaccattataagcgtactcctttcaaaatcttcgtttttaggacaggaaccattaaacaaattccaagcactattgcactaaataattttaggtaattcgtattaaatcctaaggcgattactgccgttattaaaaattgataaagaatagaacccaccactatagcaattaaacgttcaaagagagttaaaccagtagagtaaagtacctctccaataataatactagctaacccaataacaataacacctataccttttgatacatcagcatatccatcttgttgacttactaaagctcctgataaagcaattaagccatttgatacaattaagccaagcatttccattttgtcggtatcaatgccgaagctctttgccatatcagggttatctcctgttgcaatataagcttgccccaagcgtgtatagagaaaataaattaaggcagaaatcaccaagagaatagctatcaagcctaatacgagaagatttaaatcatttgaaaacggaagaaaatctttcaatgtttgaatctcatttaaacctagatttgctcttttcataaccattagcataatagagtggcatgaggtcattactaaaatccctgctaaaatcgtcggtatctttcctttagtataaagtaaaccagtaacaaatcccgctaacatccctgatagcatgcctagaatcgtcgccaaaataggattaaccccttgattcattaaggtaacacaaaccgctccccctagagggaaggagccctctgttgtcatgtctggaaattttaagattctaaaggttaagtatatccctaatcctaatatcccccataataaaccttgtgaaactgatgaaataatcataaaaccctctttctaatcgtcaaccttaacggtaatttctgcctgtttcataatcttcttaggaattttaattcctaagtgtttggctgctttcaaattgaggcttggcttccctgtatcaataactttgactggtacatctttaaccggcttccctcttaggactttaatggcctgttttgcagtttctaaccctaagccatattgactctgcgctactgatgctatacttccttgttcaaccatggtatcaacactggaatacacaggtatattagcttggtttgctgctacgataactgttctaaaagcactcgcaatagtattatcttgtggaacaaagacagcgtctacttttttggtcatgactgacatacttgtcttaatttcatttgtagatggtacagaatatttaagaacttctagccctgctttttgagcatattttgtaaactcagttacttgtgatacagaattatcttcgctactagcataaagaattcctatacgtttaatattgggagttatatccttgattaattgcacagtttgcttggtcggaacaacgtttgataatcctgtaacattagttgttggtttcttcatattcgttactaacttggcccctaaaggatcagaaacagctcccatgattataggagtgtccttagtcgaagctgctaaaccttgtgctgatggtgtcgcaattccaatcaaaatatcattgtgatgattaactaattgtttactcatcgcttgaattttactttgatcagcttcggcgtttaaaacggttaatttaacttttttccctttatatccttcttgagctagaccatcttcaactcccttttcaatagcatccaaagcatcatgggttacatactgtaaaataccaattttaacaacttgcttttctgataaattaagacgtttttctgatttgttataaaataattctccaaccactaatatagtcaatagaattagcgtagctatcagccctttatttttcatattttctcctcactttaataataccttgactttctggagtttagcgcaaaagaaaaagcgcctgataaataacttaccttgcgctctctattgttagactagaccagcgcatagatacttttttgaagtactccaaaaagtcgtatctatgcacccataaacacaactttatctacgccagttttgccaattggtaaataatgttttagtcatttactagtcatcttttctcatgaatttttctataattatatactatattctgaaaattgcaagccttttgcattataaaaaaatatttttagctcagcctatggtataataaataagctataatttttagaataagggggacgccatgtcttttgatggattttttttacatcacctcacaaatgaattacaagaacagattgaaaaaggacgtatccaaaaagttaaccaaccttttgaccatgaattggtattaacaatacgcaacaatcgtcgcaactataaactactcctatctgctcatcctgtatttggacgtatccaaactaccgaagcaaatttccaaaatcctcaaaatccaaatacttttacaatgatcatgagaaagtatttgcaaggtgcagtgattgaaaccattcaacaaattgaaaatgaccgtatattagaaatcgtcgtgtctaataaaaacgaaatcggtgatcacattaaagcaacacttgttgttgaaatcatgggaaaacacagtaacattatcttgattgataaaaatgaacataaaattattgaatcaattaagcatgttggtttctcacaaaactcctatcgtactatccttcctggttcgacttacattgccccacccaaaacaaaagcaatcaatccttttgatatttctgatcaaaccctatttgagctgcttcaaaccaatgatctaagccctaaaaacctccaacagctcctccaaggtttaggacgcgatactgcgctagaattatctcactgtttgaaagacaataaacttaacgattttcgtcaattcttttcgagagaatattatcccagcctaacagaaaaatccttttccgctgtccaattctcaagcagtcacgaaacatttcagtctcttggacaattgttagattattactaccaagagaaggctgaaaaagatcgcatagcacagcaagctagtgacctcatccaccgtgttcaaagtgagttagagaaaaatatcaaaaaactagctaagcaacaagacgaacttctagctactgaaaatgcagaggagtttcgccaaaaaggagagcttctaactacctatctctctatggtaccaaataatcaagatgtcgttgtgcttgataattattacaccaaccaaaccattgagatttcacttgatcgagctttaacacccaaccaaaatgcccaacgctactttaaaaaatatcaaaaattaaaagaagctgtaaaacatttaaaaggaattatttcagatacggaaaatacaatcacctaccttgaatctgttgaaacatcgctaaatcatgcttctatggaagatatcaatgatattcgtgaagaacttgttgaaactggatttattaagcgacgcgcacatgataaacaacataagcgtaaaaaacctgaacaatatttagcatccgatggcaagactattattatggtgggacgtaataatctccaaaatgacgagttaacatttaaaatggctcgtaaaggggagttgtggtttcatgccaaggatatccccggaagccatgtgttaattcgggataacctcaatccaagtgacgaggttaagacagatgccgccgagttagctgcttattactctaaagctcgtctctccaatcttgttcaagtagacatgattgaagcaaaaaaactcaataaaccaagtggtactaagccaggttttgtaacttacactggtcaaaaaaccttacgagtcactcccacacaagaaaaaatagatagccttaaactaaaaaaatagactgggacatatccctgtctatttttagtgttattaattatttataggtattcttattcacttaaatcaatatcttctctaagcttttgtaggtcaaagttagctttcaaaaattcttgatcttgagttgggaaacattggtcaagttggtcaacctttccaatttcaacttttccttgtgtgagcgagtaatccataacatgcccaccgaaagttaaatcgtctgaaataaagtggacatggaacccttttacccccacaccatgaaataattccggcgtccaaatcccaaccaacgtaccagatacattctctctggtaaattctggctgattagatgcaatatctgcaaaacgtttatgttgtggagattttggaatcatacgaacgtgcattcttgaaaacgttcctttgatttttaaagacttaaagagattttgaccttcaaagttttttagaatcatctcttccaaatccttattatctatctcagcattgatatcaaattgtttttggatatggtgtggtaaaaccgctgcatagggtactgtcacatcatctgataattggataatctctgctttaccatctgtaccaatagcttgataagctttcccatccaatacaatcaattcaccatcaatcatatgaacagtaccgattcctaagtcaccgtgagttaataattctccgatagttagactgcctttgtacaatcctgccatcagtgaactcaaggtactgtattgaaataatttaactgtttctgacatattagacctcgtcttagtagaactcgtcaggtaagattgtttcacctagtgtcacgttatctttatagtcaataggcacatcaatcaacactggtccattttcagcatcgattagagcttgtttgagtgtttcttcaaaactgtctttgctgtctacacggtaacctttagcaccgaaactttcagcgtattttacaaaatcaactggtccaaagtcaacacctgaagaacgcccatacttcatttcttcttggaattcaaccatgttatattttccatcgttccaaataatgtgaacaattggtagatgaagacgaactgcagtttctaactcttgagctgagaataagaagccaccatcaccagaaactgaaataacttttgtgttgggacgcaaaagagccgcagaaattgcccaaggtagagcaactcctaatgtttgcattccgtttgagaaaagcaagtgacgcgcttcatatgatttaaagtagcgagccatccaaatataatggcttcccacatcaactgtaacagtcatgtcatcggtggtattttcttggagtacatcaatgagatcaagaggatgaacaagtccatgagctgagtcacgatcaaatttaacatcgctaacgttttcaatattattacgaagacctttcaaatactcttttgaaccttctggcaattcatatcctttaatagctggtaaaagtaaatcaagtgtatgtgccatgtctccaatcagttctcgctcgggttggaaatacgtatcaatttctgcttgttcaacgtcaataacaataatacgagcagaaatttcagcattccagttacgcgcctcatattcaatagggtcatacccgatagcaataactaggtctgcacgcttcaaaagcatatctccaggttgattacggaagaggcctacacgaccaaagaatgtttcatcctcgagctcacgtgacacaatacccgcaccttggaaagtttctactactggtagtttaacagcatcaagaagtcgacgtacggcagcagttactccctctgaagatgcgccatttcctaataacagtaccggtaaaacagcattgttaatagcttgcgctaaataattaatatctaaaacagatgccgaacccaatttaggtgcactaagaggtttgattgcttttactgagactggactgtctgtaacgtcttgaggaatagagataaaacttgctcctggtttaccagatttagcaagacgataggcgtttgcaacagtttctgacaaagtattagggtcatgaacctcagcagaatattttgtaataggttccagcatagcaacgttattcattgattgatgagcacgtttcaataaatctcctcgcttaacctgtccaccaattgctagaacagcatcaccttcatctgtcgcagtaactaaccctgttgccaagttcgagatcccaggtccactagttgcaataacaactcctggttctcccgtaatacgcccgacagcctgagccataaaagtcgcgttctgctcatgacgagcaacaattaactctggacctttatcttctagagtgtcaaatacgcggtcaatcttagctcctgggataccaaaaacatatttgacatcatgattaatgaggctatcgacaattaagtcagccccatattgattatgtgattctgtcattttatctccctcttttcacaagaatggttcaattatatcacagtttttacatcagattgtgaaaatttacttgtgaattatttatttttttctgtaagtgttttcctatttaaatgttattcacccattctgacatctctatatcatctggaactaattttaaataagcctttcctacttcttgtgccttatcaaggtaaccaaattctctcaaaatgtaagcataatcttgtaaaaattctggattatcttttaaatcattatacaaagattgataatagtctacactatcatccatttctaaagccttgtgtgctttagcgatattccattttgcaaggatattttctaaattatcattgtctaattccaagacttcctcaaaccgctcttcttcaagatacaaatttgacaatctcataacaatttcatcttgattttcagaaactttttcagcttgtttcaaataagactccgacgaatgaacatcatgtaattcatacgataattgtgaggctagtaagagaagttgaccatcaaaactatttttacgaataccttgctgaactagacgtaaagcttcttcagatttatgctcctcacgaagagataaaccatagatatattcatagccagcaaagtctggattaatagtatccaactgtttaaaataaaggttagctttttgatattcttcttgatcataaaggattgttgctaactcaaaaactgttaaatcatcatactcaatgtcaacggctttttctaaaaattcgatagctgcatcaaatttccccataatagcgtaggatttaccaatacgctgataagttgaaactccagtcgtttctaagatttctcgattgtcaagtgaggcatatccttctatcgcttcttgataatgttccaaactaaggttcatttcagctaaaccaaatgtaaccaatgggtcatcgctaagtttgctggctagcaaaagcttttcacgcgcaacatcagtcaagccttccatatcatataagtcagccataacaaggagggctgaaacatactcttgactatcttctgagatataatctaagtataagaatgcttgttcaatatctccatcttcggcaacaatttgagctaaattgatagcaacttctggataatttggtcggatttgatcatagagacgttttgcttggggtaaaaaaccaatactctccaaataagctcctagttccaacaagacttcctcaggatcatttttcaacgctttttcgaaatacttgttagcatgttctaaatcctgattttggatagaaacaatcattttttcactattcaacatttttaacttcttcacttctttcttcagtaacaacatctactgtatatagcccactgacagctttgtaccaatcaaacaattctttaacaacaactttgatagatgcataaatcggaatactgaggaatactccccaaacaccaaacatcgctccagaggttaataaaataaacataattgtaattggatgaatgctaagtttattacctaaaaccaagggtgagacaaagcgtccttctagagtttgctcaataacaaaaacaatcgcaactttaacaaccataacaggtcctgcgacaagcgctaagataaacactggaatttgggcgacaaaacttcccaaatagggaaccatatttaacacaccggcaataatccctaatgtcacgccatatctaaggcctataatactatacattattgaaaaaataacaccaacagtaatagcaacaatgatttgtccttgcacataccctgacatttgactattcatttctcgcaaaatacgatcagttggttggcgtagtttggttggtaaaaccattaagaaaccattcttcatgttgcgactatctcttaaaagataaaacaaaataaagggagccatgattgttgctactgtcacacgtgcaactgtactagctaaatttcctgcccaatctaaaatattctttgaaaatttttcagcataagagaccgcttggctactgatattagataacatgctcgatatttcccctttataagattttaaccaagggttgtgatctataaacgaacttgtttccatttgcactttattcacatatgaagggagatcttccataaaatggcgtaattgattactcatcatgggaataaaactagacattgcccaaattaacagaaggattataatagtaaaaactgataatatcgctgttacacgcttaattccccgcttctctaaaaatgtaaccataggttttaataggtaataaagcaagccagaaattacaagcggcaatatcagcacagcaagaaaatcaaacacaggtttaaacataaaagagattttggtaaaaataaaaatcgttaaaaataccaaaaaggtaatcatgagagcaataactgcttgattatttaagatccatttaaaaaacaaactatttttaaattctttttctgatggtcgattcattcacatatcctttcaagatgaattctaattttaattctcatttattataacacgttaaattaaattaaactcaaaacaagagagtaaaaagttaattttgaacaattttatgcacaacatgacctggccattctatcaaatcctgtgctaaaaaattaggattacaatcaatttttgttaattcttttattggaagccatacaaaatgtcgcttatgcgttccttctttgatagattctggcgcctgacccaagagattaacaaaatataaaaattcaactgagtgataatgatgtctcttaatattaaactgattctcaataatataggctaaatcaccaacttggctgtgaagacctatttcctcaagtacttctctcgcaacagccttattgctatcttctccaacttgaagcgccccacctggcaaatagtatttatcgagatgaggagcatatattaatagcagtttttgattttctatgattaaagcagaaactctgactccgaatgtttcgagctgttctctaaccctaaaatctctatttttcataaaaattaaccgtcttttcaattaaattttggtgttcatcataaacaaacttagcagaaaagaaaggaacatcttctaaaatccatttaaaaatttcgtaatctccttgccacgttggcttagaaagaacttgatcatatggtacccattctaaagttccttctcgtgattcatcatctgaaattaactctccttcataatctgttactttaaagacataggtataccaatcatgacctggcgtaaattcaggaaaagtgatgactcctttaaaatccattttttttaccgttaaatgggtttcttctagaatttcacgcttagcacattcatcaggagtttcacctgcctccagtttaccacctaccgagatccactttccctcatgaacatcattctcttttttgttgcggtgcaatagaagtaattccttgccattgtcaatgtaacaaattgttgctaatttagtcatttcaaactcctctcattctcatattataacaaaaaatagcctttatttaggcaatttactatcaaagtagcacacaaatgattaaacaaattattttgtttaccagttatttacttttcactttgatgacattttaaaggttctttatcataaacctttaaagcatgctataattaggaaaaaccggtttacaattttaaaacctaaggagtaaaaaatggaaatcaaaaagaaacatcgtattatgctttattcagcccttattttaggaacaatattggttaacaatagttaccaagctaaagctgaagagcttaccaaaactacctcaacgtcacaaataagagatactcaaactaataatgttgaagctccccagactgaaagtaccactgtcaaagagactagcaccacaaccacacaacaagatttgtctaactccacagcttcaaccgcaactgcaacagccactcctagcacaatgaaacaagtagtagataatcaaactcaaaataaggagctggtgaaaaacggagattttaatcaaactaaccctgtatctggaagctggtcacatacaggcgctagggaatggtctgcttggattgataaagaaaatactgctgataaatcacctattatccaacgtaccgaacaaggccaagtaagtctatccagcgacaaaggctttagaggtgctgtaacacaaaaagtgaacattgatcccactaaaaaatatgaggtcaagtttgatattgaaacaagtaacaaggctggacaagctttccttcgtattatggagaaaaaagataacaatacgcgactttggctttctgagatgaccagcggtactactaacaaacataccttaacaaagatatataacccaaagttagatgtctccgaggtgacacttgaactttattatgaaaaaggaacaggttctgttacttttgataatatatcaatgaaagcaaaaggccctaaagactcagagcatccacaacccgtcacaacacaaattgaaaaaagcgttaatacggctttaaacaaaaattacgtttttaataaagctgactaccaatacactctaaccaatccgtctcttgggaaaattgttggtggaatattgtatccaaacgctactggttcaacaactgttaaaatatctgataaatctggcaaaataattaaagaagtaccgttatcagttacagcttcaacagaagataactttacaaaactcctcgacaaatggaacgacgtgactattggtaatcatgtttacgatactaatgattcgaacatgcaaaagcttaatcagaaattagatgaaactaacgccaaaaacatcgaagctatcaaactggattctaatcgcactttcctttggaaagatttagataatctcaataattcagcacagttaaccgctacttatcgtcgtttggaagatttagctaaacaaatcaccaatccacactctactatttacaaaaatgaaaaagctattcgtactgtaaaagagagtctggcttggcttcatcaaaacttctacaatgttaataaagatatagaaggctctgccaattggtgggattttgaaatcggtgttcctcgctcaattacaggtaccctagctctcatgtataactacttcactgacgctgaaataaaaacttataccgacccaattgaacattttgttcctgatgcaggatttttccgtaaaacgcttgtcaatccatttaaagcccttggtggtaatctagtcgatatggggcgcgttaaaatcattgaaggtttacttcgtaaagacaatactattatcgaaaaaacttctcattctctaaaaaatctttttactactgctactaaagctgaaggcttctatgctgacggttcttacatcgaccatacgaatgttgcttatactggcgcctatggtaatgttctgatagatggtttgacacaattgctgcctatcattcaagaaactgactataaaatctctaatcaagaacttgatatggtttataaatggattaatcaatcatttttacctttaattgtaaaaggtgagttaatggatatgagtcgtggacgctcaattagtagagaggctgcttcttctcatgcggctgcagttgaagttctcagaggtttcctcagattggctaacatgtctaatgaagagcgaaacttagacctcaaatcaactattaaaacgattatcacttcaaataaattctacaacgtcttcaataacctcaaatcgtattccgatattgccaacatgaataagctgcttaatgacagtacagtcgctactaaacctttaaaaagtaatttatcaacctttaatagcatggaccgcttagcttattataatgccgagaaagactttggtttcgcactttcattacattctaaacgtaccctcaactatgaaggaatgaatgatgaaaatacacgtggttggtataccggagatggtatgttctatctttataatagtgatcaatctcattatagtaatcatttttggccaaccgtcaatccttataaaatggctggaacaactgaaaaagatgctaagcgtgaagatacgactaaggatttcatgagcaaacatagcaaagacgctaaagaaaaaaccggtcaagttacaggagcatctgactttgttggttccgtcaaacttaatgatcactttgctcttgccgctatggactttactaactgggatcgcaccttaacagcacaaaaaggttgggttatcttaaatgataagattgtctttttaggtagcaacatcaagaatactaacggcattggaaatgtttctacaacaattgatcaacgaaaagacgattctaaaacaccttatactacatacgtcaatggaaaaactgttgatttaaagcaagcaagttctcaacaatttacagatacaaagagtgtctttttagaatcaaaagaacctggtcgcaatattggttatatcttctttaaaaatagcactattgatattgaacgcaaagagcaaacaggtacttggaacagcattaatcgtacttctaaaaatacctcaatcgttagcaatccttttatcactataagccaaaagcatgacaacaaaggtgatagctatgattacatgatggttccaaacattgatcgcacaagttttgataaattagccaatagcaaagaagtagaattactagaaaacagttcaaaacaacaagttatctatgataaaaacagtcaaacttgggctgttatcaaacacgataatcaagagagtctcattaacaatcaattcaaaatgaataaagcgggactttacctagtacaaaaagttggtaatgactatcaaaatgtctattaccaacctcaaagcatgacaaaaacagaccaattagctatctaactagccgtacataaaaaacctatcatcaaaatgataggttttttggttcaattagttaatgacttcttgcgttttagcgtagttagcttcaactgcttctttctctgctttccaccaatcttggttttcagtgtaccagttgattgtttcttccaaaccttctgagaagtttgtgaattgtggttcccaaccaagttcttcacgcaattttgtagaatcgatagcgtaacgaaggtcgtgtccagcacggtcagttacgtgatcgtaagcgtcttttggttgacccattttctcaaggataagttcaagaacttccttgttgtttttctcaccgtcggcaccaataaggtatgtttcaccaatacgacccttagtcaaaatagcccagacacctgttgaatgatcatttgtgtggatccagtcacggacgtttttaccttcaccataaagtttcggtttgattcctgccaagatatttgtaatttgacgtggaatgaatttttcgatgtgttggtatggtccatagttatttgaacagttcgaaatggtcgcttttacgccgaaggaacgtacccatgccttaacgataaggtcagaagctgccttagttgatgagtaaggtgatgatggattgtattttgtttcagcagtgaatttttcacctggtccttcaccatttcctggaaggtcttcacgaagtggcagatctccataaacttcatcagttgacacgtggtggaaacggatatcgtatttacgagctgcttcaagcaaagtgtaagttccgataaagtttgtatggataaatggacttggatcgttaagtgagttgtcattgtggctctcagccgcatagtgaacaatagcatctgctttggcagccaacttgtctaccaattcagcgtcagcgatgtcaccaacaactaactcaacacgatcaccaagaatggcttcaatgttagcacggttacctgcatatgtcaatttatcaaggacagttacatgaacatctgggtggttattgtaaacatagtgtacaaagtttgatccgatgaaaccagctccaccagttacgataatgtttttaaattcagtcattttttctccgaaaaattttttctttttgctatttgaaggatactgttctgttagaagtagttctatggaatgtcatgcctaagaaatcaatatttcaaatccctgagggaacaggccttttgcatgtttcctttcacccttgcgtcaaacaacattgctaattcgtttttacttgctaaggttaatgccttttaagaagttgaaaattacaaatcttccttcttcaaaggttttacatctttgagaagtgggtgattcttatctgcttctgagacttctgcttcttcaaggttttcccactgaatgcctagatttggatctgcataattaacgaaagcatattttggtttgagttcaagtgcccaataatcgttaacgagataagtataagctgctttatctgaaagaacttggaaaccattagcaacaccgcgtggaacaaagataccttttgaggcatcgataatcgtttggtaaacgttaccaaaactgtcaccttcacggaggtcaacccaagtaccgatcacacgtccttcatcagcgatcgaaacatatttatcccaaggctctgcatggagacctcgcaaagtatttttcttgttaaacgaaatattattttgtagtttgtctgcctcaaagaagctttctgggaaaccaagcggtatcattttttctttttgaaagttctctttgaaccatcctcggttgtctccacgaacgggaatatcgaattccaacaatccaggaatagcttcaattgggcgacaagttaattctttatcaaaaaattgttcagtcattaggcttctccaatcaaacgaagtaggtattgaccatactcatttttcttaagtggttgtgccaactcaaggacttgttcacgagtgatgtagcccatgcggtaagcaatttcctcaaggttagcaacttgaacgttttgcatgcgttgtactgtttcaatatattgtgctgcttcaagaagactttcgtgagttccagtgtctaaccacgcaaatccacgtcccattaactcaactgataagtcacctctatcaaggtaggctttgttaacatcagtaatttcaagttctccacgagggcttggcttaatatttttagcgatttcaaccacatcgttatcatagaaataaagacctgtgacagcataattagacttaggttgcgctggtttttcttcaatagaaatggcattcatatcagtatcaaactcgacaacaccaaaacgttctggatcttttacttgatagccaaagacggttgctccactttctttactagctgcacgttgtagcattgcagataaacctggtccatggtaaatattatcacctaatactaaagcaacgtgatcatcaccaataaaatcttcaccgataatgaaggcctgtgctaacccatctgggcttggttgttcagcataagaaagagagattcctagttctgaaccatctccaagcatatcttcaaagcgaggcaaatcttgtggagtagaaataatcagtatttcttttattcctgctaacatcaaaactgacaatggataataaatcattggtttatcataaattggcatcaattgttttgatgcagcacgagttaatgggtacaagcgagtacctgaacctcccgctaaaataatacctttcatagtaaggtctccttatttatattaatcctacatattataacactttttttaaacgctatcatctactaatctttttcacgtattttgtaatatcgtaatcctctaaatttagctgattttctttatttaagattaattgacataattcataaccaattaatgggcccactgttaagccagttgatcctaatccacttgcagcatatgcaccctccatacaagggacagggccaaaaaatggagaaaaatcacttgtataggcacgaattccaacacgttcagaagtcgtatctgctttttttaattgcggaaaatagccaatagcttgctcttcaaacttgtctaagactttaaaatcaatgtttaaatcaaaagccatatcattttcgtgacttgcacctacagagactttaccattatcaaatgggataatatctagctcaccttctggcattacaacaggatattttcctgtattaatattgctaaaataatagtctcgcaattgccctttttgagggcgaacatctacctgatagttgtgctcatctaatatcttagctagccaggctccactcgctaaaacaagtttatcaaaatcaattccttgaacacgaaagccattatcagttatcgtaaagtgaacttcatccttgatgacattaacaccacttgcttctaacaatattcgtgttaagtccgccccttctactcgtgctcctccgctcgcataaagtaactgttcatagccatctaactcaggaaagtgagtatttgcttcacttttatttagtatttgtaaatcacctattagaggagattctagtcgacgtttatctgctagtgcaaacaatgactctaactgactctcgtccttttttaataagaaaacaccagtttgctgataaaattttgtttcaaaaccatctttttgtaaatccgtgactagctttgaataaaaatcagcccccaacctcgccatacgataccaggctttattacgacgttttgaaaaccatgggctaataatccccgcagcagccttagttgcttgtccaactccataatcaaaaacagtaacctgaatatccttttcttttgataagtaataggctagtgtcgctccgactgctcctgcaccaataattgctatctttttcataatagctcctacatatggtaaaagggatttgttggagctttactctctaaaactgaaatatcccagcctttttcaagtttccactgctcaatcatagtagctattttagaaacaaataaaacctcaatatgatgacctgggtcaatcgcaagcaaaccatttgtgatcatttcttgtgcagtatgataataaatatctcccgttacaaaaacatctgctccttttgcaatagcttctttgtagaaactttgcccactacccccacaaatagcaactcgttgaatttcaggattagatttatcatatgaaactaaacgaacgctatctaaaccaaacacatctttaattttccatgcaaaaaattcaaaactctggggtctaatatcaccaatgcgaccaataccataaccattacttgtctcagataatatatcgggatattgaatatctaataattcacaaaaccagtcgttaagtccattaggaacgatatctatattagtatggctcacataaacagcaatgtctgatttaagaaggtctatataaatcttattttgcggcgttgctaccaaatcctttaatggacgaaaaataggagcatgctttacaataagaagatctacttgacgttcaattgcttcagctactgtagtctctcgaacatctaaagctaccatgactgtctttatttctttatctaaagatccaatttgaagacctgaaatatctccttccatagataattcctgtggacaataagtttcatatacatcaataagttctctagctttcatcaagaacctcctttatatcctgtattttatcttccaaaatagcgcgttcttccattttactattgggaatagagtttaaagcaaaagttaatttattaagctcattttgccatttttctttaaaaaccgttgtgttattggataataaaaatggaccaaatcgcaattctttagcagttaaattcatatgaccatgcttaacaactaaaatttcatagcgtttgtcattttcagtcaagatatcttctgctactatttcaaaatcatttgcagctaaccattttcttaaatcatcttcccgattattaggttgtaagactagtgttttaacgtgctgaagtttgtctatatcgttattcaaaatatcagcaatcaaacgaccacccattccacagatagttatcgtatcaatattatctgcttcttcaaaagctgacaaaccatttgctaagcgaacatctatctttgaagtgagaccatgttctgaaacgtttttcaacgcagactgatacggtccattcaccacttcaccagcaatggcaaaatcacagtatcccatctgcaacaaaaaaataggtaagtaagcatgatcacttcctacatctaataaccgagctccttttggaacgtagtttgcaactttttgtaatcgttttgataattgtaaatccattgtatttccttcagtttttctctgttaaaagtataacatcattaacatcaaaagaaaaggagcagacctaatgtatcaaccattctgtctcctcctagtaaacttattcccataaattcattgcatttttaaaatcatccgaaatcgctaaatctttcatttggttatcttcacgtgcttgttttctctcttcaatttgtcgaagtgtcgtcaatccttcacgccgccagttgcgaaggatagcattgatataattccaacttgttttcccattgaaaaccgcttctctaagagctgccctaacaatatcaggatctgtctgatcttcttgcagtgtcttttgtaaatcttctaattcaaaaggacttaataagcgacctaattcacgttcgaagtctcctactaaatctttcagacgattcgaatcagaggttttattgtctattattacttgattatcctcttcgaaaagtttatctaatttagcaaacacagggcttgtatcaaagataatctcgatttcatgattcaactcaattgttttgacatctagtaaaccttgacttgttaaattcgatatagaacgattgatatctgccactgttttatcaagtgatgtcgcaatacggctcggtgttagatcggataaattagttgtattttgtaaatagaaaaattgccaaactaaaaaatcgtctgctgtcttaaaaatagatttaaagtgaaaaaataaagcacttggtagagtcaattgccctgactgatattgttccaaataagtcataacctttcaaatcctctctatcgtcctaaaattatgaaatgtgtaacaaaaagcacctctcaactattatcatagcacttagaggcgcccttatcattcatctatcttgaataggccttatcctggaaagttcatcaataccttagtatcataaccttcaatagctttacgaccatttaatccatcaagttcaactaggaaagcacagcctgcgacaacgccaccaagtttttcaatcatttcaattgtcgcttttactgttccaccagtagctaaaaggtcatcaacaattaaaacacgttggcctggtttaatagcatctgcgtgcattgtcaatgtatcaagaccatattctttttcatagtcagctgaaataacttcgcgtggtaatttacctggtttacggactggagcaaaaccaataccaagagcataagcaactgggcaaccaacaataaagccacgagcttctggtccaacaatcatatcaatatctttatcagcagcatattgtacaatttcacgaacagcatagctgtatgctttaccatcagccattaatggggagatatcacggaaagtaattccttcttgaggatagttttcaattgaagcgatgtaattatttaaatccatttcacttgtctttctaaggggaaacccctaaaatgttttactcttcattatatcataaaattaaataaaatagtactggaaactttaaaaccatatgctagttttgcatatggttttaaaaattaggcatctgttaccttgacaaaaggtgctccaatatcaattctatcctcactataatagctctgttctttccaaagttgtgaaattggataccaaccagacaaggacggtgtgtaagggtcagagacatgtgtcagtccgttattatatcctttgagaacgatttcatgacttccatgaagaacaaaaacattattttgtactgccgctaggacatgataaccatccttcaacgcttgtacaaggttagcttgagttcctaatgcagttgcagttacaccccattctttggctgcttttaaaattcctctagaagttgttccttgaacaccacgattaaattcaactgtcttatggtaaaggtaatctgcaatttgcgttggtaaaacagtttctcctttcaaagaagacaaaatcatagctagagaagttggtacacaaccagtttctcctaaagttgccataccatatcttcgacttgcccaccttccatcacgttggctaaagtaaggagtattataatttgaatgtgcgacttgtagagaagtttttaccaataattgtttttgattagaagcattttcctgataaacatggataaagtatttaccattgtctctatgatttgtaacattaaatgtcaatgtagcttcatgatttttgggtgcgacggtataccacttaaggtcatcctgattgtttttatctgaccaaatagcaatttttaaatccccaggactaataacatttgtcactcgtacattatagtttccagttcccttataagtcgtttggacagttaccggtattttagcagtctcaactaatttaatttcgattgcttcaattcgttttccttggttagtactaccagcgatgtcattgttataagtccaatcctgccaaccataatcttgcatgtgaactcgatacatcacactataggttttcgatagcagacctgtcaatcgcatctgaatagcttctacttgttgagattcatttggtacattactttctctccctgaattaacaacagtttgccaacctgaaccattaagaaaagttctatattctatatttcctagagctgtactacctaagttaagtttgatggcttttatagattttgaaagtccaatactacctcctaattggccttccaaaaccgttggtttccaaccatctttttgaagataagtttgataacttaatccaggatgcttcatttctaagaatgaatgatttgtttgggaactaaaatctgaagctttagctactagttttacctccaaagcctctaaacgtttcgattctccgactgtacctgctacactattatttttttgccaagccatccaacctttatcttggacgtgagcgcgataataaatatcataattttgttttaaattcccacttaagtccaattgaatagcttctagtctttttccttgataatccttacttgtttgactacctaaaatttctccccaacctttatcttgtacatgagtacgatagagaatgtccccatacttcaaggtgctaagagtgaattttactccatctagggctttggattctcctaaagttcccgccatttgtccttcaagtttattagattgccaaccattttggcctaccttaacctgataatttaagacaggtctctcttccttaggtatagttggtgttaaaacagattgtcctttaagggtaaattttacttcgtaagcttcaaggcgctttgacattcccaaagtcccagcgtaagctccatttttagcccaagccatccacccgatatcttgaacatgaacacgataatagacatcatataatttttgtaaattatcagtaaggttaatgcttagtgcttcaataggtctactctgaccaacagtaccactaacttgaccactctctactgaaggttgccaaccttgtcctttaacataagttttatagctaagttttcctgttattccttcaggtgctttaatagacaattttattgcctcaacctgcttttcttgtcctactgttcctgaaactgttgcattatcaaccgacttttgccatccaatatcttgaacatgagcagagtaagtcactgttggtaattgctttgttgaattttgttgagtaataacttcactatcattagctacttgattaacattagaatttgtttgatttgctgagtgctcagcagtactagcttttacaacaacttttgagctagcatcaaaggttttgactggggtagctgctatctctctaggattagatgaaacagatgtagcaaaggctgtttttattaaaggctctgcactatttttcatagcctccgaggaattaacaggtaacgttaacttggaagtatccgaaatagtctgactgctatcagttttctctgagatcgttgaagttactgcttctgcctgttctgccttgacatcttgaccaagaattgcactaccacctaaaatggtaacgatacctgcaacgacccaaaatttgccttttttgtacatcttttttctaacgataggtctcatagattttatcctcgcctttaatattctttatcaaaaattccattattttcttaattttattatattttaataatatttgcaatattattattgaaataacttatttatataccaaaaaaaccacttaaaaagtggtttctttagtatattatcaactcatcataaaatcatatatttctttaggtgtccctaaagccattaattcttgaaacttaactgtctcttttaattcttgataaatttgactctcagagatatctcgcttttctgcttctttattgactgtcataatcccttctgtaatcgtaacaaaatgtagttcttcaaaaatttgaatcattttaattaataaaatatcagggatatgaaggtaggaactgagctcttttaacttataacgaacgtcaaattctgggaattgatatattgttttatataaactagcaaactgatcacgtgtaccataaccagatataaaataattttttggtatctcatttttaaaatagatggcatcaaactgtttaccttgagtcatttgttttaattcttgtggatgatcgggaacagtcaaaagaataacttctttgctctgctcttcttgagacaggattggcactccatgaggtaaactacttgctttgcttctaatatcaaataattgaataccgtctacacgcgcatcctccaacattaattgtagggttgtggcaccattccattgattaacagataaagtgacagctaactccaaatgttgtgcttgttggaactcttgtagttgactccccatattaaatgctaccaaatcaagtgcttgtccatcttgttctagttttaatttcagatgagcaccgttttgccccatgactctggcttgactcactttaaaatcttttaacaaaaagactggttttttattatccattccaaatggcgctaacttttcaaaatctctaacagtgtctaaactaagttcgtcaaaacgtagctcactatcaattgtcagagtttttttctgactcatgtccaattgttttttagagatatagtcacataaaacttgagaaagatcacctactttactttcctctaaagtcatgcctgctgctccgctgtgacctccaaaagcaatgaataattctcgatgctggtcaaaagcttgaaaaatatcaagtgcttctacacttctggcacttcctttagcaataccatcttcaatattcaaaacaataacaggttgtccagttctctctaaaatacgacccgccacaatacctaaaacccctggatgccaattttcttttgctaaaacttgtacaggctttgtttgatcaagcatttgcatagcttggtcaaagatagtttgaacgatttctttgcgctcttcatttttttgatcaatcatttgggctattgcttgagattcttcatcatcaaaccctgttagtaattcaatagctggattagggtcatcaagtcttcctaaagcgtttaattgtggagcaattttaaatccaatagtttcttcatttagtgtttttaaatcaatatttgataaagatattagctcctgtaagcctattctttcactatctttcataacttcaagtccagcttttaccatgatacgattttcatcagttaggctaaccatatctgcaatcgtcccaatagcaaccaaatccaacatttctgtcgggattgtttctaagagagcacaagctactttgaaagcaacaccacaccctgctaaataaggaaatggataattagcatcaggatgttctgggtgaataatagcataagcacaaggtaaatctgctggcatactgtgatgatcagtaactaccacgtccacaccttgattttgagcatatgtaattgcttcatgccctgccacaccattatcaaccgtaatgattaatgaaacatcttgttgttcaataaaatatttataaacactttgattgggaccgtaaccatctgtaaagcgatttgggagataaacctggacttcagctcccatcatatctaatgcttctttcatgattgatgctgatgtcattccatcagcatcatagtctccataaactaaaatagtttcattattttcaatagctcgtctaatacgattaacagctttatccatatcatttaacaaataaggatcatggagattttccaaattagtttgtaaaaaatgatgtaattccgctgatgtcttaatacctcgcgaataaattaaggaagccaccgcttcacttatcttttctttttttgaagcctcaaaaaagccagcgtctggcttttggttattgaggacccaactatacttagcagatatcatttataattgaatacctttctggcaaaataatcagctgtttttggaaataaactataatatttatgcgcaaaagctaatataaaaggaagatttaattctctcttattttttccaagaatagaaactacttttttagatactttttctggtgttagagcaaaacgacctatacttgctaaataatcaccacttggatcagcctgagcaaaaaatcctgttttgattggtccagggtttacacttgtcacataaacatttttttctgctaattctaaacgaagagcattcgaaaatccaacgacagcaaacttactagccccataaacgctagctttacttgttgctatgaggccagccatgcttgcaatattaacgatatgaccagattttacaagagacatcttatgtcctatctgacgagctatagacatcgttgcaaatgtattcacagcaaacatgtctttgacttcttcatcactataatcccaaaattctttaaaagaaccaaatccagcattattaattaaaatatcaatttgaccaaattcaccataaattttttcaatcatattcgttacagcattgtcattagttatatctagtgataaacataaggtgtttggtctctttccataaagcttttcaagtttttctcttgatctccctgtgacaattaaatggtcgtcttggggtaattggttaataattgcctgtgctaaaccaccagaagctcctgtaatcagtatcgttcttgccattttatatacctacttcttccaaatctctaacaagatgggtatttgaaaaaatcgtctttgcatcttcttccatttgccaacaatctcgccccataaaacgagcactaacatgatttaataatagtcgtttagcatttgcttgtttagcgatatcagctgcttgcatattggttgaatgcccatgcgatttagcaattcgctcatcacccttaccataagtagattcgtgaactaaaacatcagcgcccaaagctaacctaatacttgcatctgtttttctagtatctcccaaaatagtgattactttaccctttttcggttcagaaatataatctttagcaataatttctctaccatcttctaaggtaacattctcaccatttttgactttcccaaaaagaggaccaaatggaacacctgctagtttcaatgcttcagcatctaaagtgccctcaagatctttttgcacaacacgatatcccatacaaaagatagtatgatctagcttttctgcataaacggtaaatttatctgtttccataatttttccgagtgatgattcatcaaactcgtgaaaatggattcgataaggtaaacgtgaacctgatgtccttaaggcagtcataacaaaactttttataccaaccggtccataaatatctaaatctgtctgctcttcattggcttgaaaagcccgactggataaaaaacctggaagaccaaaaacatggtctccgtgcatgtgcgtgataaaaatttttttaactttacgaggtttaatcgtagtttctaaaatttgacgctgtgtaccctctccacaatcaaacatccaaacctcgttaatttcatctaataatttcaagactaaacttgaaacattacgagctttcgctggttgaccagctccagttcctaaaaattgaatttccatacttgttgacttttttataatccttccataacttaataaatttaattagtagatttagtatcaatataaataactgactcacgtccttgactagaataatagtatttacctgactttgttttaaccaactctaatagctcttcttgattgaaactagttattttaataatatcttttttaagttgtaagacattccctagtaaacttgtttctggtgtaatattttgagattctgtttcgtcaaaatctatttttgccattctgataccagaccgatctcgatagactttatattgaggaaaaatctgtgcaatttctaagagtaactgcggtgtaatgacttctttaacttcagaaaaaacactcgcttcttcttgatcatttaggtaagcaaaaccaaatgattttcctgataaattcaaacgaataaaaggtttttcttcatcaaacgataaatgttttggaaacaagcccaaggctttggaaagatcaaaatagtaatcagttgcagcttctggcccttgcttttgatatatttcagcaaaataagcattaatcacactaggaggtggggtgataaaatcaagtcgttgctgcttagagaggccatctagttttttctctagataaactttatctaagctcgtaaaaccaccataagtcaaagctaaatcaatataatcaatcataaaattcttccagcttccatttttgtttaggagaaatatagcctgtaatattctcgtattcttcttcaaaggtgtaggtatcaagcaatgctattttattgagatcatagagcttatatgcttgattttgatgcactctaatcgaaaattcgtcaaagatatgtcgtatttcatccacaataagacggcgtaataaatccttactcccttgttttttggctgcaattctcacatttggaaaagttgttgcattcagctgctcagtgacatccatcttgttgtatatcgctaaacgaggaatatctatcatatctaagtctttaagaatctccataacaactttttcgtgttcttcatgattagggtcactagcatcaataacatgaaataataaatcgacatgtcgactttcttctaaggtagacttgaaagccgcaactaactctgtaggtaaatcttgaataaaaccaacagtatctgttaaagtgacttgaaattgattttgtaaatagatctgcttggttgtagcgtctaacgttgcaaataattcattggcttcatattgcttatcatcggttaaaacattcataatagttgacttgccagcatttgtatatccaattaatccaattttaaaggttgtcgaatcaacacgtctttctcgaactgtctcgcgatttttttctacaatcttcaattgtctttcgatatcagaaatttgatgacgaatggaacgacgattcaactctaactgagattctcctggacctcggcttccgattcctcctgcttgacgactaagcataataccttgtccaactaagcgtggtaacatatatttcaattgcgctagatgaacctgtaattttccttcatgacttctagcacgcatagcaaagatatctaaaataagttgcatacggtcaataactttaacaccaagttcagcttccaaattagagttttgtcgcggagtcaaacgattattaaccacaacggtatcaatctcatctgcttctacaatagcttttatctcctctaatttaccagatccgataaatgatttactatcatatttatctcttttttgataataatgattaacaacatttgctcctgctgtcttagctaagctagcaagttcttccatggacatttcaaaattctcagtatcttgaagttctaccccaactaaaataacacgttcttgctcttctttagtttctatcacctataatctcctttcaatatttttttcttgttctaaatacgtaatctttattataacataatgccctttaaatgcgagaaacggctttatttactttgatgataaaaaatcactgacttttcgcttgattttttgttgataattttcctcaccaaccataataaattcgacattcatacggtttctaaaccatgttaattggcgttttgcaaaacgtctggtattttgttttagtttatcaacagcttcttctaatggtatttgctttgaaaagtaaggaaataattctttatagccaattcctttacttgcttgaacactcgggtagttatcgtatagccatttagcttcatctaagagaccattgtccatcatcaaatcaactcgtctattgatacgatcataaagcacctgacgatcatcattcaatccaattaataaaacatcatacggactttcactattttgcaaatcattcccaaacttcgccaattctaatgcacgaatggcacgtcgacgattaacttgtggtataataatggattgttctgtcaacttttcaaataaatcttcatcacttagagactctaatttttcacgataggccataagagtttcttgattgacttcgcctcctaaatgatagccctcaaacaaactctgtaaatataggccagtacctccaacaataataggaattttccccttagaaataatcgtatcaatagctacttttgcctctttgacgaaatcataaaccgaatagttctcatttacttcacgaacatcaatcaagtgatgataagcttgttcttgctcttctttactagctttagccgttccgatatctaacttctgataaacttgctgactatcaccactaatgatttcgccattgaaagttttagctaattcaattcctaatgctgtcttcccaaccgcagttggaccaacaactgctataagtttgatttttctcatgatacttctcaattctataaaggtttttacttgaaatttaactagtatttcgttaccataattatatcatagatagaagcagagtcttcatcatagattggagaattattatggttaaaaaattcgcatttgctaaaggaatagcaacaggagtcgttgcaacagctgctactcttgcaggtgctgcatttgctatcaaaaaaacaattattgaacctgaggaagaaaaaatagcttttatcgaagaaaatcgtaaaaaagctgcacgtaaacgtgtctctcattaaataataactcccttactagctagtaagggagttattttatattaaattgttcgccttaaaaagaaaatataacgtaccattactatcataacaataagagttgttgtcccaatttcaaagtggactagcccctgtatatcaactggtaatgatagatgctgaatacttaatttaagtgaggtagctgagataacaagggggaaagtaaaggctgagaaacctggtgtaaaatcaccaatcagtaatttaggcacctgaaaaagaatgaaaaaataaagaaattgtgccattacgattaatagcagtaataaacctctatttggtgacacaaaactattgacatatcccgctgtgattagcgacattggagcgcaaatagtagttatattaggcttaactgccgaaggtagcccgattttatatgctttaatgaatagaaatggtaataatactaaagttgcaataaaaccataccaaaagactattttcccaatagtaaattgtccactaattggtgctgtcaggctagctacccctataccaacatagaggacagaccaagaaggaaaaagattagccatcgaaaagtgtctcaaatatttccatgaaaaaatagccatatgaatgattaacgcaataaatgacaaccaccatacaccttttgacagaactgctacccatattcctaaacttctaaataataagatataggttgataaaatcatacctgccataaaaaaagtagtaaagacagaagcaatcaaaggattgcttaactccttcctgctttcttttttattttttaatattcctttgattaaaaaaatccaaaaaacaagtgctactagccctaaacaatagcgaacataggtgccatatccctctagaaggttccccaaagctaatagccctaatactaatcccgccatcactaatggtggtttttcccaatttttcatcatatacctcataaaaaaacgtttacatctattataacacaattagattttgctgataagtgattttattaacttaatgaaaagaagctagtccattgactaacttcttttttaagctcttctaaagtttgcttttattttaagtgacgattcctctttaaagagagacctactagagcaagtagacttgctagaatgcttattcctactacacttagtatttttgatgacttatctccagtttttggcaaattagcttcatttgtcagatatgaatcggccttcttagaaactacaggagttattgaggtcttattagctattctatttactttttctaccgttttagattccttgaaagattgtgttttgggataatctgcttgcaattcctccttagggctaggagcaactttgccaactttaatcacaattgctgttaatggatcaatcagcaaactatctttttcaaaatgaacacctctaggagttgagattggtttaatccccgcttgatcagcatcaacaattacttgcccttttaaaaggtgtttatatttttcacctagtaaaacgtttctagctttactatcagcattaacaaatactgcgtaaatatcacctttagaatctattgtttggtaagcaataaccaaatctttttctttaatatcaccttgacctacctctgtaatcaagctaacctcacgatcaatttctgctttgctcaattttcggaaagcatctgttgaacgccttaatgtgattaaacctgctgtataggcctgtgttttcgttgaaattgggtgtttgttattatctgtggctgctgcccaatcaaaatgattaatggcatctgaagaatcatatgaatcatgaataaaatatgggtattctttaacagcttcaataagtgttgctttattaggcaatttgtcatctgaaacttttgtcatgtaatcagggttaagtaaacgcttcgtacgaccatactcttgaccagaatgaatgaatgctgtcccttgagatgttaaaatcattacatttcctaaacgcagacgtctatgaatctcttcttcagctaccttagggtctttattaattgattttgcaatcacatcatgcaaggtaaggttatcatgtgcagcaatatactgcaccacatctcctggcgaatctgcttcaaaattcccaggttgtgctttgatatttttaaaaataccttgtaaagattgtgggccacctgtgatgaaagctggagtaccttcatttggaaaaccagatttcaagctattacgaatatcatctgaaaagacgccaactgtatcggttgacttcatccaatcttggtcagctggtttaaccggctgaccttgatcgccttggaatgttctccagccctcaccaatcataatcatattaggattaatagctttagcttctttataagctaattcaatcgcagccgcatcatgatctcccatcatatcaaaacggaaaccatcaactttaaattcacttgtaagatatttaatggaatcaaccaaaacacgacgactcattgcatgagtggttcctaaacgtccccctccaaaactttctcttggtgaaccatcttcattcataaagtgataataattaggttctatatcctcaaagagataagtttttgcagtgtgattatagacgacatcaagtataacccccatgccacgtttatgaatatcatgtattaattgttttaattcggcgatacgtgctgatggatcttttggtttctctgaatacatcccagaaagagcaaaatagctctgtgggtcatagccccaattgtaattattgtctgaggaagtgtaagctgttgagcgtgacttatccatttcattaacataaaaataactcaataccggtaaaagctgaatgtgtgtaactcctaatttctgtaaataatctagtttctctgaaaaggctgcaaaggtaccaaattgattttttaattttccatccaaagatcgatcagaagtgaagtctcttacatgtgcttcgtatataacagcatcttgtcttcctttaaaattagcaattttagcaaaacttaaattttgaggtccaagttgacttggatttacaaaagctgctttagccgttttaatatcatcattaacagtattactatcccactctgctaatgactttgcataaggatctaaaatcttaaccttatccttacctctttttatttcgtaaagataatagtaaccagtatagtttttaatacctaatttagtatcaagtatcgtctgccaaacacctttattatttttcataaggggggtagtcgctacaaccctgttttggttatctttgtcataaataatcatagtgacactatcagcactcggtgaccagaggctggcttcaacttttgaaccatcttgattgagaactgcacctaaatttccactataagcataaagttggtctttaaattcccaagattgccttgtcatgacattgttaccattataagatatgttgaaatgaccttgtttaggattaaagtcgcctttgattattaaaagagatttactagtatcgagagtgatatcagaaatttgtatagcattttgatttttatcagtcactttcaattcttttaaaatttcagttttatctaccccatctagagttgtaaaacttgcttgaatacttgttaaatcaatttgttgggcatcctttagctgcacttgatcaatgtaataaggattattataaacctttggatccttatcttttacaaaaatttggttatggttagctaaatctctaaaaacatagtcgttgggttgaactttcactgcatctcctgtcttactttcatctaagattagaaaaccaatctctttggcgttagtttttagtgatacatcaatataccttccatatagtccttgattcacaaaattactaccatctggccaagttgttgagggggttgcaacatctttaaagagccatgctgataagtggtcatagttactagaggaactcaaatagttaatacggacatacccttctttgaggggttgataagtatgtgtaccgtacttttcatcaatccaaacttggttcatctcaggtcgtaataatggaatatgatgatcgccgcttaaatttgtccctgctttgttattaattaaaaaagatatttgttttcgttgtttttcagataatttaaaatcaacataataaccgtaatcatctttcttagcatcagtcatagggatagcaccatttggccaattactagacggttgatcaacatctccccatatccaaagtccagtgctttctacaggatgaccttgaggcaattctttaagatgtagcctaaagtaaccattttcaatccgtggagcttgattagctactttcaaggtagggcttggagcacctatagcttgagaagttttgtcgggagtattttgcaatgtagatggtgctacttttaaatctaaggtatttttatctgaaacaggacctttattttcttcaagcaggcttgtcgccttatccggctctgtcactcccttttgagtgtcagtttcatctgatactaattgcttggtatccggcatatctgagggtgtcacaaccgtctcagagtttgagtttatgtcatcttttaaattagtagattgttggttgtcaacctgattaatattcgactctgcaatcgctgtatttgcaggagaagcacttacttcttcagcaaatacctgtggactatgaagaaaaatacatacccctgttgcaactgaagctactccaacacttaactttctaatcgtgtattgagtttgtttatcaccaaataagtcttttcttttcatatcattctccttttttaatgaattgttaccaataaaatcataacaatttacgcaagcgcttgcaacaagtaaatgatttctttatttttttgaaattttcactaaaactatcaatagcattacaaaaaagctaagcaatattgcctagcttttttatcaaaaatttcctcatatcaaatgattttcatcaatttgatagtcctttagcagaccttgaagtctatcaaattcataacaaaaatgttcaggaatatgaccgtcagagcctatagagtattgtttacaaccaagctgtttgagtatctctaaagcatagcgataaagtttttcattcccatatagataaagggatttggtatttagttcaaaagctaaccccttagataacatctttatgaaaatgcgcttcaattgcgtttcaaacggttttaaatcttctacatctaagtttaacttacgaaaaccataatcaaagtgagctaaaacgtgcgcttccacacggcctatggcaaattccatacgattaaagtaatctgctaaaagctcctttgttggtactttcagagcttcttcttgcagataatcatacctaccattatgatggattgacaatagttttaaatcaaattctttattttttaaataatctaaaatatctgattccctatctttaaaataaccgatttcaattcctttttaaatcgatttccatatttctgattaagataatctattttttgacaataagcactataatcaggaacatcgtcttgaccggtgtaaggatttgataaatcaaaatgttctgttgtgataaattcacctgtaaaaccattaatatagtcctcaaatgccgtttgacaatcataggaaaaatacgtgtgtagatgattatctctcataccaactcctatccttaatcttttaaaatatctgctactatcttttgtaaatcaacgattagatctttttcaaaccatggattcttctttagccaaatttgatttcgcggtgatgggtgaaccaggggtaaataatcgggtagatagtctttgtaagctttaactgtttctgttagatttttatgtgcggagcttccaagataatatttctgagtatactgaccaactagcaaggtcaattgaacattaggcatttcttttaaaataagagggtgccatttctccgcaaaaccttttctaggggataaatctcctgattttcctttgcctgggtaataaaaatctaaaggtaaaacagcaaattttccagaatggtaaaatgtctcttcatcaactccaagccactggcgtagacgatctccagatttatctttccaatagagtcttgcttcttgagtttttaaaccaggtgcttggccaacaatattgatcctagctgttttaggagcagcaaacaaaggatcaataccattttctgtataattttgattctgtgaatcactttttattgctttaataattttttccaagtcagtcataaagtctccaaatctaaccttatgaaaagaggcaaagacactttcatgtcttcaccaccctttatcattgatcacatatttagtttaaggattattttatttgattaattcatagatagcttctgcgtagatagcagccgaacggaaaatattttctaaaggcatgtactcattagcttgatgcatagtgttttcatctcctgggaacatggcaccgtatgcaacaccccgttcaagtaagcgaccaaatgtcccaccaccaataacctgttcatgtcctttaagaccagtttgcttttcatagacagctagtaaggttgatactaattcatcgtccataggtacatagtgtggtgtgtgttcatggtcagaaagagtcactttttcaactccgttaagtttctcaagcttagtttggatagttttagcatctgtcccttgtgggtaacggaaattaagagcgatagtattatcatcattagtttcatcaaactggaagacacctgcattcatgctcaatggtcccatacagtcatcttcataagctactccaagtttttcacctgagaagtcttcgtgaataatgttggctgtaacatctaagaaagcacgagcaggaccttcaaaatcaaattgacttagataaagagctaaataagtcgccccattaacaccttcttgtggtgttgaaccatgagcagatttaccataaactgttgctgtatattgctcatcttctacagataattctgctttcaaattatgtttacttgcaaaatcagctagactagccccaagtgttgtctgatctaaatgacttgtgaaacgtgctgtggctgattctggaaccatgttttcgcgaagtccgccagaaaagctatgcagtctaacagctcccttattttctcctgaaaaatgtaaatattcagtaatattacctttttcaccatttataattggaaattctgcatctggagagaaaccaaaatcaggttttggaagaccaacatgttcgaagtagtaatccatatctccccatccagattcttcatcagttcctacaacaaaacgaactttcttagatgttggtagcccaagctctttaataatttttagagcataataacatgccattgttggtcccttatcgtctgatgagcctcgagcatataaacggttatccttgataactggttcataagggtctgtatcccaaccgctgcctgcaggaacaacatctaaatgcccaaaaatacctagttcttcttcgccttgaccaaatgtaaagtgtcccgcataattatctacgttttttgtttcgtagccatctcgctcagccatctcaaggaaaaattccaaggcttttacaggtccaggaccaaatggatgctctgcatcagcttgtgaatcatcacgctccgagttaatgcgaagaagatttattaaatcgtccatcaaagcgtctttgcgtttgtctacttctgctctaaaatcaattgtcattacggcaactccttctataaaatattatgtagtttgtgcttaaaaattaacgtttttcaataatatgatcaactggcaaacgataactaggttcaaccttttcatcactataaccaacagtaattaatatttctggtctaaaacgtttatctatctctaagacatcattagtaatcgctttatcgaaccctaaaatcatattagaactaataccttgatctgtcaaggcaagtactaaattcatagcaacgatacctgcatttaaagagagatactctccagtttgtttttcactatataaagcatagcgtggtggtagagtttccatgtaataaccaattaaatcatcaggaagagatctacgaccaatacgagctattttccgtgatctctgtcctaaatctgtatctgtaaataaagcaataacatactgcgcttgattaatttggttacaattactttccggtaaaccttctgctagagcagattttttttcttggacaacgacaaacttccaaggctgaatattattagcagatggcgctaatgtcgcaatttcaatagcagttctaacatctttaaagtcgactggtttatcattaaaatgtttcacagcatggcgcttcttatttaattctagaaatttcataaaaacctcctattctatttgattttccctactattctatcactttttaaaatgcgtttcagcttttgaaggcaaaattgataaaaaagtgaaaccggtttgaaaactaccataaaaaacaaacaaacttgtggtacaatatctaatgactataaaaaaggagctattcatgctacgagcattaaaagaagatttttttctaaccttaacctctttaaaaaatcaattttgggtttacattggaactggtatcttaatccaaactttagttgcttatttagtaaaaggaattctgagttttatctttcgtcggatattgatattgtcaaatactcccgcagtgactaaagacaattggactttactttttaatcatcccttagctttattactctttatactttatatcgtaatcctaattgggttcatctatactgagttcgctatctatactattgccatactgaaaactgaattttctctcagtatcaaaaaatggctaacaatctttcctaaaaaaataaaatcacttttaggaccacagctaatttgggtatcaatctacttacttttgacaattcctctagctaaccttggtctaaggtcaagtatactagagcatcttaaaattcctgactttatttctggcgagttaacaaagacagtctttggaaagataggttactctacccttttactgcttatttgttacttaaacctttgattaatttattttctcccgctgaccattttaactgactacaatgctaaagaagcacttttagagagttggaaacttagccgcggaaagcatcagtggcgtcttctaagtaaaattattttaaccagtttatttatatctgtaattggaacagttgcactagctgttgttgctggtacattttcattcattgatcattctggaaacaattttcctcttcaagccactttctataaccttttaaaatcaatactttttgccgtaacacttcttattaaatgtttaatcataagtcacctattagcagatattaaacaaaataaaagtattgttcaacaatggagagcttggaaaggcgtccaacataagcaaaaatttaaacacattgcttgtgttatcctagctctagctattggtaccactgccttaaaaaatgctatagctctggctctcctacaagataacatttcaattaaaaaagaattaatagcccatcgtggtgatacatcacatggcgttgaaaattctattgaagcattaaaagcagcccataaagcaaaagcagattattcagagatggatgttatcatgacaaaagatcataaattagtagtcatccatgatgataatctcaaacgactctctggtatgaacaaagatgtttctaaactaactttagatcaagttacaaaaatcccaattcaccaagggcgttttgctagtcacattccatcatttacagaatttatgaagaccgctcagtcactagatcaaaaaatcatgattgaattgaaaccgtataatcaaaacctcgatatctatgcggatgaatttatcaaagaatttaaagagcttcgtctctcaaccaagcataaagtaatgtctctcaacttgacactcattgaaaaagttgagaaaaaattgccacaacttgatacaggttacctaatcccactacattggggaacgcttcaaaatcataacgttgacttttatgggattgaggaattttcatacaatgattggattgcatatctcgcccaagaatataataaacagctctatgtttggactattaaccgtgataaccttatgatacgttatttacaaagcccagttaatggaatcatcacagatgaactcaaccttttcaaggtcattaataaagatatcaaaaatagccctaattattatcaaagagctctccaacttattgatagcgagggttaaattaaataaaaagcttagtagaacagtatctactaagttttttatttaggaggatcattaagagaatctcggagactttctgcaacagtcctaggaataccacacataataatgtcctcaatctcagctttttggatattaggtaagcttttaaaatgtttcattagcaattgtttacgttttggtcccaacccagtgataccatctaattttgaagaaaaggaatttttggagcgtaattgacgatgaaaagtaatagcaaaacgatgtacctcatcttgaatacggtgaagtaagaaaaattcttctgaattacgcggtagctctactacttctaaaggatctccaaaaagtaattcatgtgtttggtgtttatcattcttttgcaaacctgcaataggtatggctaaaccaaattggttctcaataacatcacgcgctatatttacttgcccctgaccaccatcaattacaatcaagtccggaggtgtcaagccatcttttaaaaccctactataacgccgatgaatgacttctctcatactagcataatcatctggtccgataacagtcttaattttaaactttcgatagtcttttttacttggctttccattcacaaataccaccatagcagctactggacttgtcccttgaatattggaattatcaaatgcttctatgcgtactggtttagggatattaagaagattacctaaattttcaattgccccatgagttttacgaatatctttttccagtaagtcaaacttctgttgtaaactgacacgagcattttttattgccagatttactaactgtttcttttcaccacgttgtggtttaacaatcttacagcctacaattgtttcaaccgacttagcatcaatatcctgtggaataaagacttctttgggtagaaaatgttttgtatcttgataaaattgccctatgtaagttagaaaatcttcctctggttcattataataaggaaacatattcacgtcacgctgaatcaattttccatttcgaacaaaaaagacctgtacacacatccaacccttatcaacgaaataaccaaaaacatctctatccttcatatcttgatgaataacacgctgcttagtacgcaacaaactaattgcttcgatcaaatctcgatattcagccgcacgctcaaattccatagtcatagcagcgctcttcattttttcagttaatccgttaacaattttattatctttaccattaagaaactgttttacatcttctctcagactatcccaataagctttattagtttgacaaactgtatgtgcattgcattgccctaaatgataataaaagcatactttatttgctggattagtacatttcttaaaaggaaagagcctatctagtaaccgcttaatctcagttgctgccccagaatccggataaggtccaaaataagtgccatctgatttttttacttgacgtgtaatcataagacgaggataacgttcatttgttattttgatatatgggtaagacttatcatctttcaatcgaatattatacttcggcatattttcttggattaaattaatttccaataatagagcttcggtattagatgttgtcacaatgtattcaaagtcttcaatctcagagaccaaaagttctgtcttagtattatgactcccatgaaaataacttttcacacgattcttaagatttttagccttacctacataaataattgtcccattcttatctttatgaaggtaacaaccaggactgtctggtaacaattctagcttatgtttaatcagttcattcatagaactattataacaaaatgtactgtaatctttacgaaataaatactattccccaacatctattgtatcttccaatacttgaataaaaccccaatactcctagtctaagcaattattttatgttacactttaaacaagtgaattattgaggagtttttatgatagacgttgagaatattcttgaaaaaatgaaacctaaccaaaaaatcaattacgattgggtcatgcaacaaatggttaagcagtggcaagctagtgatatccgtccgaaaattctgatgcatgtttgctgtgctccttgtagtacatatacccttgaatacttatcacaatgggcagatgttaccatctattttgctaattcaaatatccatcctaaagatgaatattatcgccgcgaatatgttactcaaaaatttgttcatgatttcaacaaaaatactggatattctgtacaattcttatcagcaccatatgaaccaaatgaatttttcaaaattgttcatgggttagaagaagaacctgaaggtggggatcgttgtaaagtttgctatgatttccgtcttgataagacagcggaaaaagccgttgaactaggttttgattactttggcagtgccctaactattagtcctcacaaaaactctcaaacaatcaatactattggtattgatgtccaaaaaatttatgatactcagtatcttcctagcgaccttaaaaaaaataaaggttaccaacgttccgttgagatgtgtaaagattatgatatctaccgacaatgttactgtgggtgtatcttcggtgctaaagatcaagggataaatcttctccaaatcaaaaaagatgcgaaagctttcgtgagtgataaagacggcaaagaagaatttcctaatatacgcttcacatttaatggcaagtcaatgtaaatgataaaaaaagacttagtaaagaactaagcctttttggtataaatcttgtcaaactttaataatacaacttcttaatcttttgcagacgttggtttagaaatagaccacaaacaaaaatacctgtgattaaaccaatccaataggcaaaaggacctaactggctatttttttctaagataaccgctaatggcaaagcacataaccaataagagcccgcaccgatcataaatggttttgttgtatccttatagcctcgtaaaatcccctgtacaggagctgcataagcatctgcaaactggaaaaagagactataagttaggaattgagctgtaatagcgacaaagtgagggtcactattatacattgctgctacattctcacgaaatagaaataaaaatagtaaggttcctgatgtaatccctaccgctgttaagcgtcctatcctactataagtgtttgcgtcctgaaagcgctctgcccctacttcaaacgatattgtaatagctagagcagtggaaatacttaaaggaaaggcatacattaatgatgaaaaattcatagcagcctgatgtgctgcaataatgattgaagaaaattttgccatgaataagcctactactgcaaaaattgcaacttctgcaaaaatttgtaaaccaatcggtaatcccaatcgaatatcttcaataatcaaaggagcttttattctttccagagtccatatatgatatgttttaatttgaggatgaagtgacatcacaataataataacaataaaaatagcccaataagttaaagaagttccaagacctgcccccgcacctcctagtctaggcataccaaatttaccgtagataagcatataattaaaaaatgaattaaagggtagaattaaaagcatcagatacatagataaccttgttaaccccaatgcatcaaagaatgaacggcaaatgctaaacaacaccagcggcatgattccaatcaacatataatttaaataaccacgaccaactgctagaacttcatcttctaaacccaaactccccaagacaggttgagcaataaattgcatgattaaaaataatattaaggacagtatcaaacctaaatatagaaattgatgaaattctgtgcgaatttgttctttatttcctctacccaaatgttgaccaactactggtactaatgctgaaatcatacctactaataaagcgaaaaacggagtccataaattactagcagttgacacacctgccaaatgtagctgactatactgtccagtcataaccgaatcaataaaagtagctgaaaaattagcaaattgataaatcaatactgggataaataatttcaaaaataaaacaaatttttccttatttgtctgagtttgatacatcttttttctccttttcaccttaatcaatttattttagcttagctaggatactctgtcaatgctatttaaaaaggttgagaaataatcctcaaccccattttagctaagctcagtattgatttgccatgtcataccatatttgtcagtcacatttccataagctggactccacggaactgcttgtagaggcattttaatgttcattgcatctcgagaaagcttattgaataactcttgcgcttcttctacagattccacaattaaagctgctgtcatattttgtccaatttgaaaatcaaaaataggattattgtcagaaagttgcattcgaataccatcaatattaaattgagcgttcataattaaatgttcaagttctggcggacaatctggccaaccctgtgcaaaagttgtgacgtgttctgcttttgtattaaaagcctcttcataaaatgtaatagcttcggccccacgaccattaatattcatataaatttcaattgctttcattaccatacctcacttcatattatccaaccaacgctgcatcagagtttcattttccccttttagggtaaaataagaaccacgtattatacctgcgagttttgacttttgacgagcaaacttaaacttgtccgctaattcaataggaatatccattccatctgataattttaaacctacagctctctttttaggattatctaattcatataaaatattaatggctaaaccatcctcatagaaaacatgtgtccataaaatacgattctctaaaaaaagctgtgaaatctctaaaggctttgcagcaaaaacaaggttacgttcattttttagaaggtgattaatatctgccatcaattctggatagtctgatactggaaatgtttcgtaggctactttgaatttattccagaaatagcgagcttcatttgcacgcaaaccagccaaggcttctgccactggagaagtctccaaacctttagttgaaacggttttaaagtcgataatcatgttctttcctttttgattaaaatcttcgataatttagtatactcttttttgaagaaaaagtacattctaatcacttataaaaagtagtacatttagaacactaccacctcagtaatttcttgacctttctctacttaatacttataattaatctagacttaatgtcaaagcatcaatcaaggtgtaaacctgattcacctaaaaagctgatggagctaaacatgaccaaaaagatattcttatttatctgcgctactcttttagtaggaatagccttatatacaccaacaacttctatttttaatcataacaacgtttatgctgccaccaagaaagcaaaaattaaatttaataaaactcaaaaaaaaattgtcaaaaaagcaagagaatatgctaagtctggccatatgtctaaagatagtatcattgaaaaattaaaaaaggattctaagaaatatcgtcaagaagacatcaactttgtgattaataacctcaaggttgattacaaaaaaaatgccttgatttctgccaaaatttattcaaagaccatgaatttatctaaacaatctatctttgaacagctctattcggagtctccagataaggcaacccactctgataaatttacaaaagaagaatcccaatatgctatagaccatctcaaagtagatttcaaagaaaatgctcttgagactgctaaaagttatcaaagtagttcttctttatccaaagaagaaatctataaacaattgacatctacgctgggcgataaattcacaaatgatgaagcccaatatgctgtagatcatttgaaatgatgacataccaatagtctatccttatgtaatagaattgatagcttatgctaatattccagctgtaaaatagcaagaaccctcctaagtcttaatgaacttaggagggtttttatcaatatgaataggttacactaaactagacagaaattataaagtgttctacacttaagaaaaactggagaaaaaccatgtctagaaaagtacgtcgtcacttcaccgatgattttaagcaacaaattgttgacctttacaatgttggtagaaagcgtagcagtctcatcaaggtatatgagctaaccccttccaccttcgataagtgggttagacaagccaaaacaactggttcattcaagtctattgataatctgacagatgaacagcgggagctaattgaactcagaaaacacaataaagaactcgaaatgcaattagatatcctaaagcaagcagcggtgattatggcacaaaaagggaaataatcactgctaataaggataaatacagcatttcaaagatgtgtcgctggctgaatatgccacactcaagttattactatcaagccgtggagtcagtatctgaaacggagtttgaagaaactattaaaagaattttcctcgatagcgagtccagatacggatccagaaaaatcaaaatatgcttgaataacgaaggtatcacactttcacgtcgtcggattcgacgcattatgaagcgactcaatttggtttctgtttatcagaaagccaccttcaaaccacattctagaggcaagaatgaagcccctattcccaaccacttagacaggcaatttaagcaagaaagaccactacaggccttagtcactgacttaacctatgttcgtgtaggcaatcgttgggcttatgtttgcctcatcattgacctatacaaccgtgaaatcatcggcctgtctcttggttggcacaagaccgctgaactcgttaagcaagccatacaaagcatcccttacgccctgaccaaagtcaagatgttccattcagatcgtggcaaagagtttgataatcagttaattgatgaaatattggaagcctttggaatcacacgttcgcttagtcaggctggttgtccttatgacaatgccgtagctgaaagtacgtatcgtgctttcaaaattgaatttgtttatcaagaaacctttcaattgctggaagaactagctcttaagactaaagactatgttcattggtggaattaccaccgcattcatggtagtctcaactaccaaacaccaatgactaaaagattaattgcctagaaaaacactttataaatgttgtacagaaaagtgttgccttttcacttaataaaagaaagattgaaggaacacttctctttcattccgaccaagggtcacaatttaagtccggggaatttagaaaaataattgatgacaacaataggcactgaatccctaaaatgagacaaaagaaaaacactcctgttgaaatttagtaaactagaaacaggagtgttttattatggttaaaaaagcatattcatgggaaactaagctggcttgcatcgatatgaagaaagcaggcaagtctaacagagttattatggagactttaggcatcaaaaataatagtcaaatctatacttggatgaaatggtacgaaaacgaggagctttatcgttttcatcaaggtgttggcaagcaatatacctacggtaaaggcttggaacatctgtctgaagtggaacaattacaattacaggttgacctcttaaaaaagtatcgaggcttgataaggaaatcgataaagtaagtcttatcaagcttgtggaagactataaaaacaactacccgatagttttcattctagactgttttaaggtcaagcggtcgacctattaccgttggaaaaaggagtatgagaagccgcaaaaaaagatgaccttattgaattaattgaacagctctgtatggagaatcactttatttatggctatcgtaccattacacgattgctcaaaaaaatccacggattgactgttaatacaaagaaagtctatcgtatcatgaaaaataatggctggctttgtcggacacgtaccaagaaagttcccaatttgggtaaagcttattatttaacagataataaattgagtcgggatttccatgccgataagcctaaggaaaagctcgtaacagatattacctacctatatttcggtaactgtaaattgtatctctcatcaattatggatctctataaccgagaaattatagcttacactatctcagattgtcaggacacggattttgtactagacacccttaatcagttaaaattgcctaaataaaggagcaatcttacacagtgaccaaggctcagtgtatacttctatggcttactaccaggcttgcacggaaaaagacattatccgctcaatgtctcgaaaaggaacacctgcagataatgcctgtattgaatggtttcacaccgtcctaaagactgaaaccttttatttccataataggagaaaatacaacaaagatagtataacaaatattgttaaaaattacattacattttataatgaaactagaattcaacagagattaaacgaccagtcgcctgtacagtacagaaaactgattgcctaaaagtgtttttcttgcgtctcactattagggtgcagtgccaatatcatgcattctttttctaatcctggatatccttatgataatgccgtaactgaagcatttttcaagtatttaaagcatagacaaatcaaccgaaaacattatcaaaatatcaaacaggttcaattagactgctttgaatacattgagaatttttataacaattacaacccacatacggctaatctaggactaacccctaatcagaaagaagaaaattattttaacgcaataaaataacacagttttctgtctacttatttgacattagtccaagaatcctcctctttttttactattctaacatggataccatttctttgcaaaagaaaaccgctattatccaacttttatcactactcgttacatagaatgacttcaaaatcaccgtaacttgctttgacaaagcagtgctttaacaatgagatcttcttttggttaagggtttatttgttgaagtgtcttgatatcataagttaccaattcaccatttttattataaaattggacaccttctggttggaaaatgagatacttaggatcgatattagctttttgtgctaattgattgatatgatcttctagggttgctctatctagaccatagtctggtaaactgtctataaagtcatctgattctttttcttctttactggcttcacttggctgttggttttcattgctcttatctgcctgttgcttttcttcaggtttatccgtatcagtagcatcaccagcatttttctttgccaataactcttgagcttgttgccactcagcttgggatagatcagatttattaatggttctcaatgaactgccatctgctcttgggatgctaaaggagccatctttccatacaaaagtttcttttgccaaaacatctcgtggatcgaaaatatagccgtctggtgctgcaaaacgaccttctgctagggctttttgaacttcttcagcagaatggataatttgccagtttggcataccagcacgtttatcaagaggcgtaacatttggaatgaccgaacctgactcttcatgccctggcttagaccatacatccggacgaacttcggggtgttgcatcacatacttgattgttgcaatctgattgcgcgtcaaccatgaatacggaacgacatggatatgatcaatatgtgggataacaaacgaacttccagtatcgtaagtagcattaccagcatgcatcggcagacttgacaaatctacagcaagtcgtggctcaatgcctgtatcaacaatgtcataacggtaatgcttcttatctttaagcattagttcttgttcggcaaaggcaatctgagtcaaatcaagttgataacgagcatagaaatagtccttgccatcttttggcataatatagcccactttaccatcttttgttactttgcgactcacttttttagtgtcaaagagtggtttttctttgccttgttcctgatccaaagcagcaacaagctcatcagcttgaccttttgctttcacccagttagcgacctcatccaactcatattgttcaagttctccaaatcctatataatggaaatgatctccgtgtttagctgtaactcctgatttatccactgaatgaatggattctttactaaaaacataagcatcactcgtatcatatggtttaccatctaagccttttccgtaagctttgatgcgatgaccaagaaaggtatgtgtcacttctttatctgatggttttgagtgatctgaacctgagtcgttgtcatcagtttggccggctaagtatcgatctgctaattccatttcaagaggtgataactgacttcttgggataatatgataatgatctccatgaggcaccacatacccaaaagcgtttgatttgatcacttgagtcggttcaaaaatcaacccatcttcttccacatgacggtatttcaaatcaagacggtgtagttgatctaaaagttccttaaaggtttttcctttaaactcatctctttggtgtttgttttgtgacgcatcatttggcctaggaggcgctggatgataaccaccgttatctggctgatgaccttgtccagggttaggcgtcacatcaggaattggggctttcctacgacctggggctggtgtcgggcggtaatcagacggtctagcacctcgaccttgtttttgactccagtaggcttgtgcagcagctagctcacttggagacaaatcttttttaggaatataatgatagtgattaccatgaggtactaaataagcatctcctaaatcatcaatgatatctgtcggactaaaaatatagccatcgtctgtagtatagcgtccttgtctttttgcttcattgactgccgcaacttcttctttactgagatgggccacttgagctaaacctttttctttagcttctttagttcctttggctacttgctcagcaatttgttgtttggttcgaatgtttttgcgcttactacctggcttgaggtaaacataatagttgccattgactttaataacgtaaccgtctaagatttcattgataacgtctgattgtttaaaatggtaattaggatccgtcatcaacaactcttcactaataatcgcatcataaggaactttcccattgtaaaaatgataatggtcaccgtgtgaggtaacataaccttggtcagtaattttgactacgatctgttcagcagagatgccttcttcagcactgatttgatccatcgttttgtttgttttaggggcttttaccttacctttgctatcatcaatataggcaatctgattgtcctttgttgctagacccatatgatgcttaccaagctggtaacttccaatatgagtagctagtaaaatagcagcaactgagccgatataaccatatgttttcttcactaataatctcctttacttcaactgttgatagagcacttccaaatttgctctaagattttctagatatgtcttgtttccgcttggagcagcttcaagtggacttaatgtctttactttagctcctgttgatttcgcaatagcatgagcaattttggggttgacgttgtcttctgcaaaaatagtcttgacgttgtattctttaacaaagtcttgaatttctttcaattggcgaggagagggctcttgctctggagaaatacccgagataccaagttgtttcaagccgaatcgtttagccagataagaaaatgccgtgtgttgcgtcacaaatgtttttgagcgcacctttttaaatttttgagtgtattcttcagttagttgctctgcttcttttttgaaagccttagcctttttagtgtaactgtctttgtgtttaggatccaaatgtcctagctctttagcgatattaacagcttcctcaccagctaaaacgggatccgtccaggtatgtgggtcataaagtgtcgcagggtcaatgccttgtgtgacttccatatcttctagccctttgactctatctagtgtcagaggttttgacgcttcaaacacattaacctttgatttttttaaattagggtctagatcccttgcccaagcttctaaggtatgtgaatggtaaacaaacaaatccgcgtcataaatagctgccacatcatttacagacggttcaaaggaatgaatgcctgcacctgattggatcatcctcacatcatttaggtctccagatacttcttttgtcatcgcatacattgggtaaaagctggttacaactgacatgccttgcgtaggctgtttggggtttgctgacttatcacaccctgctatcattactaaactcacaaccatagccatgagaaaaaaaacttttttcatagtacctcctcaattataatttaaccagttattaaccagttaattttactcctttatcaatgctttgtcaatgacaactaccatcttttatcacatcaactgaagggataagcaaaaggcaattgttgacagctatttgtcctaacttctttttgatgaggtagcacaatcgagtagaggctaatctctagcccctctcacaccaccgtacgtgccgttcggcatacggcggttcaactaacttttaacgcatgtcgttcaagatagtaatctaagcaactgaccagtcctcgctttgcgagggctggttttgatatagcacgtttgagtaccgacttctgagctaccaactgatagtggtcaccccatccagaaactttatcggctatccatctagcaactcctagttttaagagtccccataggcgctttgctttcttcttccattgcttccagataatcactcgaatacgggttcgcagacgctcatctatttgtgtcatgatactcttcatattgccaagcgagaaatagtttatccatcctcgaatgacccagttcaatcgttcaatgcgagttatcaggtcaatgctccatttcctcatcgtcagttgcttcagttttcgcttaaagctctgaacgctgtcttggtgaggacgacacttccaaccttttggagatttccagaaaccaaatccgaggtatttgagtttgttcggtctgacaatcttggtcttagtcatgttgactttcaaccctaatcgcttctcaatatagctactgaccgaatgcatgacccgcttagcagctgcttcgcttccgacagtgatgacacagtcatcggcgtaacggacaaagcgaagacctcgcttttccaaccctttgtctaactcattaagcataatattagataggaggggtgatagattcccgccttgaggtgtcccgactaaagtcttatgtcgctgtccgttaataacaactcccgaatggaggtacttacgaatcagtgactccgtatcgccatcttgaatgatattatgaaccagggacatcaatctgtcttgcggaacagtatcgaagaacttttccaagtcaatgtccacaatccactcgtagccatcgtttaaatactcaagtagctgaacaatggctgtttcgcaggagcgattgggtctgaacccatagctatactctgaaaaatgtttttcgcagagtggactcaaaacttgaacgatggcctgctgaatcattctatccatagccgtcgggatacctaggttacgaactcctccgtttggttttgggatttcaaccctgagaaccggttgaggtttatagctcctctctttgatgagttgcttggtttctcgccaattttggtgaagatagtcatccatctgctcgatagtgaccccattgataccagcagaacctttgtttgatttcacttgcttgtaagcttcgagcatattgttccgagataatatcttatctagcaattctgacatgtgcgtattcctttcttttttcgttgtctgcatgatatcttacattggtgaaccttcctctagtcaatacgtaaccgcatctagttctatcagaccgtttgttttacagacacaagtgaagtaggattacttcgattagttgttcaccccttcgttccatttccattacagaaacttcatcactactatgggttcggctgacttcttgtcgttcgttgttattaggttttaccctcgacaggacctcacgggataagtcggacatctttcctcgtttactctcgtgatttacgtatataggttacgactacctatttggactttagagtttatagccccctcatccgctatatacgccttcatatcacgtttctgttcgtagagccacgatttcgctatcccttcctctccccgctacctcacgatagtcaggcttgggagtcgctattgggttcaccggtagcgggtgcccacagaggacttgcatctcagatgtacgacatgcccgtcgtactataaaaaaatagagagaaccaaattggttctctctattaaataagctcttatcagtttaagtaatactattttttagtttctttttggcgttttgttttaaatatatgagctgctaatcccaagaagaaagtggtcataactaacttaaggagatgtaaacgatttgtatccttgtcattagtcgttggtaactgatctcttgttgatgcttttgtagctaaagcacgcttagaagatcgtttctctagagtacgagaagattgacctttttgaggagttttacctggtgtttgacctgaactatctttttctggtttagtttcttttttttatctggtgtttgacctgaaccgtcttgttctggtttagcttctggttttttgtctggtgcttgatctgaaccgtcttgttctggcttattagagtggccctccaatagcttagtcactggtgtataagtgatgttaccagccatatcttcaacaacataagtaaagtctgacattttcaatggaacagtagcgccttccattgtttcagcctcttcaggaagagtaaaggtaccatcttcatttggagaaatatactctgttgttggcagatcctcatccatataagtgtaagcaatacgctcacggtaaaccggttggctggtttttggtttagatgcaagtgtcaaacgactatcttctgttgagaatgttgccgatgttgcgacttcaggtgtcgtattgtctacaatcacatcaaaatcagtgtgttgttcttttgcacctgagctaatcggcgtgtagcgaacacgataggtgtaggttccgttagcaacaactttgccgtctttatttttaccgtcccaacgcgttttttcaaaacgggttgaaccaagtgtgcttgccaagtcattgttgtagtttttaacaacttgctcggttacctcacttgtccaaacaacatttccttctttgtccaagacttcagccacaaggtttttagcattacgcaagaaagtaccttggaattggacataatctctgttaccgtccccatttggagagatcgcagcatatggtttgccattagcgtgacggtggatatagtagtggctatcatcgtcttgttttgcaaaagtacctgcaaaaatggtttctgtgatctctgaagattcgatatcctctatgttttcaaccccttctttgacagctttaataatcgtccatgggttagactctgtggtaagtgctgtaaagttatttttcagagcgtaaaactgtaatccatcaccatctaattggtctttggcatcactatttgcttcatgatagtagctgctaccgtctttgctatcatagattggtttttctaaggctgacagattgccaaaatcacctcggaaaccaatatatggaatgctcataagctcttcttttgtaggatcttgtttgaaacgaacaaaaccttctaagaaatagccatttttcatttgggcaagcaagtccttgctaaatcgactagcatcgattggaacggtgacttgtttgctgctattggctggaattgtgattttttgccatgatgtctcatacaatgctttaggagccaaggcaaagtgttttccatctactttatctgtttgaacagttacttggtaatacaactcttgaggtttatcagatttgttgtgaactgttactgttacttcaaatttatcagaaacattgttcaggtgaaccttgcttgaggtattgtccttatctgttacatacatcgttgctgctgaagcttttttagcatcgactgctcctgctccctgttggcgaggagaaaaataagctttttcatcttcatcatatagggcagttgctgagctcatcaatactttcttagctaaatcaagacgctctgatggtgtcatatcaggatactgtgtctcatattgcttttgcaacagtcccatgatacccgctaccaatggtgcagacatactagttccagaaagtttggcatacttgttgttagccactgatgacaaaatatcttggccgggtgctgcaatatccggcttaatattgccgtcagctgtcagaccccagcttgagaagcggcttagtttggtgccacttgctgttggcaataccttaggtgtcgcattgaaggtaatggttttttggggattgtcttttaataagagaccgtctcttcgactgataaaggccgcaggcatctggtcaacatttggcaattcaatcgggaagcccttgtcttgattgtcatagatcaagacccctacagcaccagcttttttagcgtttgcaatcttatctttgaaatcaatatcgccacgttcaataagggcaatcttaccttcgacatccttaaaatcatcctctttcgtaccacgattagcataagcatagtcgtaagccttgtttggctcaaaacggtttgttgaaagaacaggcatttctttatcttgatgatcgtctgttttgaccgtagcagtttcagtgagctgtttatctgggctgtaagaagcaactgtcaatgttgaatctgccgctgcaggtgtcccaaccaccccataatcaggatgatctgctagaggtagacggggcttgcccccaaagctactatcattaccagctgaggtcacaatgctaacaccttttgatttggcatagtcaaaggcttttttggtttcgtctggaaggttggcgtaagctagtgcagcattaccaaagctcatattaatcaccttagctcccaagttgacagcatctctgatagcttgagcgtagttacgagcatagtctgctagtccatttacaatttcgacacgcatcaaaagcaattgagcctcaggcatcgcaccttctaggcggtaaggttctttcatttcagatggagcatttcctgacaagatccctgacacgtgtgtgccgtgttcttgatcaacagcgtttttaccatctttactatagtcgtggtaataagcaaccttatcattgacccactcgccataggtaataccgtgctcttttttagctttttcaagattttcttttgattggtaacgtgctttagttttgtctgttaagcgccacgcttcatgatttttatcaaaaccagcatcaatcactgcaacaacggtcccaactcccttgcctgctttttcctgcagggttttgacatgagaagggtcgttcaaatccctaatagtcgcttttgaggttgctggtgtatcagcagttttagcaggagcttgaggggctagatcattagcgtcatctgctactgtttctcctacatcactaggagtttgtgaggttttagtttcctttgatgatggtgattcctcagaaactgctattggttgtgggggttctacggcttgttcggtagcaggagtgtcttctgtcacagtatttgctttaatgtctgattgtgcattgagcaagatgctcgtagatataagcgcaatggcaagtttatcaaatggtagtttttgttttttacgcaatgtgtcgtcctttcatgatgagagactttgtctttatgaccattaagaaaagagagaatcaaacgattctctcctagctatccgtctgtgtgtagagaaataaggataacgtcttttttaaagagcaaacaggggttatttgcatatgacacagctatttttcttgcttttgccataatgattaaatgtatctcatttatcaattatattactaacatctttattataaaacaaagacgattattagtaaaggtcatctttttaagagttgtttagtttgtgacctccttaacctcattcttttagacataaaagagagaaccgatcggttctctcttgatgttcactcaggtatgtgtctgaaattttgagattagtcgatacctcataaatttaagaaaacttgaattattcttaaaaagaccaaaacaagtattttttgcttgttcagtcttgacggtattgttttagttatgctacaataaggttcgactgattaagcaagtggtatttgtcttaatcggtttggtgtaggagttcgcgctccttcaccttttttgcttttctttaatataattatactactttagaagatttaatgcaagttaaaacatgcaaaaaaacgctagaaataaaggtatctttagactttttctattttgttttgattcctgttatactccattttctgccattttttagaaggggcttagaaaatttatctaattcatctgtctttttaaaaagtcgccctgcactaaatgaaccttctttatactcactgtatacctttctccaagaaccgaaaaataattctcgtaaaccgttagctctttcaagtataatcatatttgccattgtggagattccccactttgaccaatacatgccacgtcgcttcattctatacgttatctttctgtgttgtgattccatgataccaataccacgatttgaaagatttctaagatgagctggttttatatatttgaaattatttaatacttttttcttaaacttctgaaattcttgatcttcaagttcatcacaaatcagtgattcaacagtatcaaaaactaattcaagcttatcagaattatatttttttaccgcatctaaagcaaaatcggttaattcaattggatattttctaaggtatgaacttaacttttctttaacatgatagatatcccaaaaatgctcatgtttctttaccttaagtgcttttcctaattccttaaaaactctactagtatagcctttacccatatcagagttagtgattaaaatagtatcgtcatctacttcatagttattataaatataatctaaaagattatatttagctttatcataattaagctgtaatatttcgtgcttgtcccgcaattcatatcttttagtagaaactttttttgagcctgtatgaataacaaaatgtgttaaatctaaataccttctttcctctctagaatctgtgcttttaatcatgactccatcaccctcaacatacagttttttcacttttttacgttcgggtggctcttccaaataaaaacgatagcgttctttttcttttaacaatttttctacaaattttactgcttttaaaacacagtcttttgttatgattgtttgcaaagtgctatctattactttgcaaacttgacgataaggcatcattgtagccaattttgcaacatgatataagaattctattgaatatctcttatatttttcaagacctaaccactcatctactggtattctagtttcaaagccatttgtccagcgactcctactaaatgttatttctccaaaagagaaaacaaccgtacgttcagactgattgatcctcttatagcctttcgttctcatttgaggagcgatatagctttcatactgttcaatttgacttaaaaattgtttctgttttattttatttatttcatttacaaaatctttttccgagaattttttaacttccatgataatattttacaatttttgttacaggattagaatattattgctattttttattcgaaaagttaaagtaaaagaccacatttaataacgtgatctttctatttatcctactgtgcaggctcaaatccatctaatccaatgaatgactgaaacttgccagtacctgaatttgaagccgtgccacttaaactttgaacatcatattcatcttttggctcagaccattctgcatgaatataattagaatcatctgtgtcatcttttttccagtacaaatcagtattgtactgattgtcaacgtaattaacccaaattgtatcaggctttccaaaaatttcaataatatcttttaaagatttatcacctttttcaaaagtttgattgatgttttcaacagtaaaattattataattacctgatactgatgataaatcccccctaaaatcaacctttgaataatccatttcttttatataatcactcgggtttaatcctaacgtttttatataatcttctgctcgttcttcatcagtttttttgtgtttaacgacttttgcacttgtcgcaccactaggatttgtcttattctttttagaagtattactgctttcagaacctgtaaataaatttataacactactaacaataattatcactattattaaacttaaacatccaccacaaccactttttttctttacttttttcttaaccatttttcccatctaataatgatttccataataaatataattcaaactttgtttacaaatttttaaaaaagtcatttataaaagatgatgctgaacgatagcctttttcttttgatagcctatcaattttttttcggactgaaggttgaagtgtaaattgatattgttttgtacgttcaaagtccctaatattcatttcagatgagaaaatttctttcttttcttcatctaaactttcttttagaacttttgttagttccgaattttttggttcaaatgccatattcatcctctttcttataaacatagtcatatttatgtatataactatgtttatatttgtaattatatttatagtttatcagtaattttcctaaatgtaaaatcaatttctttgaagaatttactatctcttgaatataattctttatcagacatcatataagatagagactttttgtccaatgttgagcggttaaataactctttatgaggaatcattgcaagaactgatttatcattctttagtgatcttattaattcttttgaagagttggtattatgctttatcatattacctaaaaagaataattttgctgtgacataacttgctcgagttttaaagtcaaatgcctctgttttaaattcttcaagtctttcagaaagatggatgtatactataaaagtagacaaaactttgtgtgttacaatctgttttaaaagacacaaaaacgaaaggacaacctatgtcaacatttaaacgctatgatgaagaattcaaacaatctcttgttaacctttatcaaactggaaaaactcagtctgaactctgtaaagactatggggtatccacttctacgcttgcaaaatggatcaaacagtattcccaagtcaaactcgaagataattctgtacttactgccaagcaaatacaagagttacaaaaacgtaatgcgcagcttgaagaggagaaccttatcctaaaaaaagcaagtgccatattcatgcaaaacttaaagtaagactcctcgctgtctatcggttacgctttgaacacgccacaacaaccttgtgtcgtgttttacgtgtcaatcgctccacttactataaatttctaaaacataagccctcaaaaagagaattggataatcaaatttatagaaaacaaatacttgagatttataccaaagcgaacaaaagacttggtgtgaagtctatcaaggtcattcttcaaagagactatgacacaaaaatctctgaaggaagaatttgaataggttacactaaactagacagaaattataaagtgttctacacttaagaaaaactggagaaaaaccatgtctagaaaagtacgtcgtcacttcaccgatgattttaagcaacaaattgttgacctttacaatgttggtagaaagcgtagcagtctcatcaaggtatatgagctaaccccttccaccttcgataagtgggttagacaagccaaaacaactggttcattcaagtctattgataatctgacagatgaacagcgggagctaattgaactcagaaaacacaataaagaactcgaaatgcaattagatatcctaaagcaagcagtggtgattatggcacaaaaagggaaataatcactgctaataaggataaatacagcatttcaaagatgtgtcgctggctgaatatgccacactcaagttattactatcaagccgtggagtcagtatctgaaacggagtttgaagaaactattaaaagaattttcctcgatagcgagtccagatacggatccagaaaaatcaaaatatgcttgaataacgaaggtatcacactttcacgtcgtcggattcgacgcattatgaagcgactcaatttggtttctgtttatcagaaagccaccttcaaaccacattctagaggcaagaatgaagcccctattcccaaccacttagacaggcaatttaagcaagaaagaccactacaggccttagtcactgacttaacctatgttcgtgtaggcaatcgttgggcttatgtttgcctcatcattgacctatacaaccgtgaaatcatcggcctgtctcttggttggcacaagaccgctgaactcgttaagcaagccatacaaagcatcccttacgccctgaccaaagtcaagatgttccattcagatcgtagcaaagagtttgataatcagttaattgatgaaatattggaagcctttggaatcacacgttcgcttagtcaggctggttgtccttatgacaatgccgtagctgaaagtacgtatcgtgctttcaaaattgaatttgtttatcaagaaacctttcaattgctggaagaactagctcttaagactaaagactatgttcattggtggaattaccaccgcattcatggtagtctcaactaccaaacaccaatgactaaaagattaattgcctagaaaaacactttataaatgttgtacagaaaagtgttgccttttcaatctttttaaataaattttctataacaaataatctaataatgaattataatatatttagattatttaggagacttaagaaatggtaaaccaattaataattttaggaaatggatttgatagagcttcggatttgatagagcttcggatttaaagtcaggatatatggattttttcaattttagatttaaagattcagacagtactagtagtttttggtattatattttgagatcatgttataataaaaaattgtctagcgatttatggagtgatattgagaaattaatttcagtacatctaaaaaacattataacactatataataacgaaacaattttaagtggcaaagatattgagagtatatatatcgaaacattaagcactgattactcaagaaatgattactctaccagtgaggagctaacgcaaaaagcactccataattttttgtggaatcataatggtatacctattgttccagaactagataatttattattactaattcaaaaagatttaaaaatagtcgaagatgagttttgttcttatttaactaatcaaatagagatccaggaacaatcaaaagatgattattttaaagatataactaatttgggaaataattacttattaaaatctcgaattatttttgaactcttgtataaaagtaatatttctagtgcattcacatgtaattcttttgttgcactacatgattttcataacgaaaattgtttcaattcctatgaaggatttcttagctacatttatgacttagaaagtaataatgaatttaatgttgaaacatcaatattgaattttaattatacattacctagaatagataaattacaacgtaatattcatggaaccctgaatgataaaaatattatttttggaatagattatgattctttaattgatatacaaaaagataaaaatgttaccctgcctgttgaatttaccaaatcatacaggatattacagaacggaaatatatttcaatatccaattccctctgaactaacttttataaaattttatggtcatggtctgggtgaagcagactattcttattttcaatcaatttttgactcaattaatctttattccagtgacactgtactaattttctattggagttgttataacgagaatattagggaacaaattaaatctcaacaagttcatgcagtacataaattaattgaaaaatatggagatacttttaataataagaatcatggcagaaatttattcacaaaacttcaattagaaaatcgtttaattattcaagaaatactttataatgatattctaaatccatattaaacaaaacacccccacaaaatattgtgggggtgtttgtggggaagattcaattgaatctttccttttttaatcgccttaactttaacgaaaagactttaaaactaggctttcacctttaaacaaccaatagatgattatttaagagtaacaattgcacaacctgttaaatgtgcaatatcaaggggtttgagttcttaatttgaagtttggcaggaattttggcataaaattgaatccaatcctgcacttttgatattttgtgtgatttcttcagaaactgttttatctaaagcattaaaccagtgactgtaagtattcaaagttgttgatttatcggcatgtcccatacgtctggctacatataaaatatcttttttcaagacattgattagataggatgcatggctatgtctgagaccttttcctgtaattactggaactcctacctgttgagctttccgtttgatgatgcgacaaatggttgatttgcaaaaaggatctccaaatcttgaaatgataaaatctgtatcttgatttgcaaactgattttttcgccaaacttgaagtacttcaatagtaatatcatccaattcaataagtcgttcacctgctggagtctttgtttggtctttacgataccaattaccattttcatctttctctaaggttgtatgtacctttagaaattttttatcaaaatcaatatcctcccaacataaagataaaccttcgctcactcgtacacctgtcatataatataaccagatggcagtaaatcgttgcaattcttcataatcatgtaagtcaaatgatttgataaatgtctgaaactccgcataggtccaaaatggagtttctggatgtttacctctaggattatctaatgctttacaaggcatatttgaaatatagccaagtctttctgcataacccatacaagctttaaaccttgaccataaatttttcgcatagttttcagaataattctctatgatatgcaatctaaaagcttcgcaatctctaggagttattgcttttaatggctttaaaccaaaatattgaataaaaagtttatgatgaggaagagccgtcttatatgtcacagactgaaccttttgcttatatgctcttaaataaattttgttcatatagttttcaaaagtcatattgtaattttctaaactgactttgttggcaaattcatattttatacgaactaattcgtcatatgcttctttcattgtttcaaaggttttaccatattgattttttctagctttcttttgtacccttttgccagttactgggtcgattccaagatcaatctgataaaatatctttcccttattatcacaataaacacctttgtattttttactactttttgttgccatttggattctcactttctaaatgttatttagatagtggaatccctattaattgttccacaatttctgctggtgcgatacctagtcttcgattgtcaaagggcgatttacttaattgtaccgcattatggtcaactttgcgagcttcttcaaacttttttacagcaatttttttagcttcacgaataatgtctctagaggtatgttcaggaaatcctaagttcattaaatctttatatgtagcagttctcatacactttcctccttcaaatcactaagttattttacacgctagatgggatttgaatggttagttcaatcatgggaatttcacccgctgtcctttttcgatggcagcctgaacggtcagaagtatcattatcattatttgtgttatggcagataggtcaccatcctatttttgaataaatgattttcgctcatttcctggcgcattacattctattgctcaacaaataaataaagtcccacctagaattattcaattgtcaatgaacaaatcaggagggactattttaaattattctttattcggtggggaaagtcagtttgccccaacaaataatctgtactaacgttatatagatttgaaagttttattattacatctgccgataaaatacgttctcctctctcaatttttgaataagcagagtgggtaaacgaaagcttttcggcaacgtatttttgagtgaaatcattgtcttctctcaaatcccttaaacgtcggtacatcaatctttctcctaaggaaaagtatagaggataactaggagaaatttgatatattgtcctaattggacaatagaaataaaactcccaaaccgtttatttctttacaaattagacggtttgagagtagctttattatacattatacaaaaataaacaagaatatgttggaaatttgaacatttattcaatatgaatggaaaaatcgtctgtcttgtatttatccatatttaaaactcttacatattcatccaactttctaaccgcattttcgtattcttcgattttattgtctagctgattctgtatcatttcaatctcagattcaatctgtccaattgttacattctgcgataaattcatcttggaacattcatacttagctaattgcttggtatcttgattatcactttgtaggttaacaactacttctgccatcttgtttaaggtggtgtttttgtcttgaagatttgtcaattcaatatctagctgtgcgatgtctccaaccaattcatcttttaattctagaaaggatttattttgaatgtttaatgtcatcaataaattgatttcttcaattttttgttgaagactgaccagacttattcgtctcttataaggtaaagacttattgtcaaacgttagttggcgaatcaagtcccttcctttcataaatcgattcatttctgagtcctctttatgataaatgaaataagaagatgtttctcgaataaacacctgatactgcttcttattttcttgttctaagatattaagttgatgatttggaatgaagattagtccttcttgtccaatacccatccaaactttaacaaatagaccatctagcacaattttttcaatttgctcctccgtgatctcaacttcaaactcatgtacagcatctctcttagttttatacgtttcataagcttcggttatttcttctacagtcaatatttctgaaagctgttgtgtctcaaacttttcaaattctatttttacttcattattatgaagcacttcaaacacatcatgttccttgaaataactatcaaaatacgtagtatcataaagatttttctttcttaatgacttatttggtatggaaatgcagctttttccatcagaaagaacaaaatctatcgtttttttcttgctcttcaattctaatcccagtaaccgagctttctcaactaaatcatcaaatgagttggatcttagcaataaaaattctaaaatcagttcaatctttttcttggcaaagtaacgttgaaaatattcttttgaatagggttctctcttattcagcttatctccttggatgacttgcttcatatttctatctgtcataaaaaatcggctatgtttccttgagaaatctattttgacatttagttgctcagctttttgcataaaatcattgaaatcaattgaatgttccatgagaaaaaataaccgctgcttcaattcgtatttgtgattagaacgtcgatagacctcataatctctatgagaataacgtttaggtggaatgattttagcacccgctactttagaaattctatccgaaatcatttgtaaatttctttcaagagcgtagtcccacttcaactttttttgagattggctattgattgagttgataataatgtgattatgacaatggtcctgatcaacatgagtggcaacaatgaatttatattgaccacctatcaactcttttatcgtttcatagccaatacgattgatttcctctgggcttaatttatcttcaggtgagaaagactgaataatatgatgagcatgtattttctgttgctttttctcttgtctatcaaaccgtgagtcgtagagttggtcatttgaaagaaaattattttgatacatcttcaccagttccacatagtcaggaaaatcaagataattactcatcccaaaatctgaaatcaatgataaattcctggttttcttaggatcaagaatatacttaatcaattgacggcggtattttttcccatgaacagcataatgcttagtgatgaccataaaattctctcaatcgctgacactttatgtcaaaatcttgttgtaactgtgtttctaactctgctataccgagctgcaattctttgacttgttgaagactaagtaggtggctttgatttaccgaacgtgcaatctggtttatattatttccaatcctacgaatttcaaaaatcaggtcttgaaaacctcttgtatcgattgtgataaaattcatacgaggattgagtaaggtttttctggcataatgcgaaaagtttggacactgactctgagcaagatttttattgaggataattaattcttgatcactcaaatacacctttttcaaattggttcgataacgattttccataataacttaccccatgtacttgtctttgaatgaatagcttaatggaatagttacctcaatttccttcatcaagtctttgatacaagtcaggatgatttcaagatgttccatagtaactgattgagacaactttgccagaacaagtatttcatgtacatcccggtaaatctgttctactttttggtgctgtaaatattttatccattcttcaagctgctgagatggttggtggtctattttcaataatttacctctagcaaaaggggaaaattgttcatatccctcctgttccataaaattttgtatctgttgatactcttctattgagaaattgacttccttacgtatctctctaactagatttcccatcctgtatcctcctcattctttaatatcggtatatccccgccctcgtattagacacggcactgcataatatcttcctttcaggtctttgcgagctcagatattgtgtccacaatatcccaaaaatcatatcgccagctgaccaaaaccttccagttttgacagccaacgataagataacttgatggctccgcccccaaacccccagtgaaaaatcaaggattgattttcttaggaatggtattaggataacagggatgatttggaaaaggtatcacaaaattgatataatacttttataggaatattttcaaagaggtgcattatgtccaaatcatctaaacaaattgaagaagatgctgtcgattatttaaaaatggcgttaaaaaaatcgggtattcggattttatggtggaaaagggcttataaatcacccttctccaaattcttaataagtgtggaaaaatcgacacctaagttgtctgtaatgtcgtgatcattcacttcataccaattgaaagtatcgtataacatagctttattgaaagcacttgaattaaatcgtggcttacgctttttatggagcttctcattgaaaaggattttggctcgtaaggcatcaaacgagtaacctctacccattcgctctacctgcctaataatgctgttaattgactccgtataagcattagtgagccttttatcaaagtagttgaatatttcaacatgccagttgtctacggctctcacgaggtctttatatgcgtctttagagttgctggacatacaacggtgtctccattgactataacgaagatgaccttcatctggatcaggagtatcccatatccagtaaaactcttctttgagttcataggcttcttttaaagcaggaagattacctaaccaagtatctaagaggaatgattcacgttcatttagatcgtgtttacgctttagaaggataaacctttcacgcataagggtacgtctttctttttggctcatatgggctttcaaagactttctgacgttatctaaggcttgattagccattctaactacatgaaacttatctacgacaactttagcttgtggaaggatagtgttcactgcgtctttgtagggcttccacatatccattgtgacgtactcaatgtaagtcctgtcactgatttctgaaagacgttggatgactgtttccttgttacggttaggcttgatgtcataaatagtcctgcgttcaatattagtcaatacaagccgaggtctacggataatatgtatctcgtctatcccaagccacttaggagtttcaaactggtattcacgttctttgagtgccacatagtccttaaaaacgttcctaatggttttctcgtcaacaccaacgctttctgcgacttctacaaaggtcttagacatggattgctcttgaatggactttaaaagccttttggtcatactacgcttttcatctacagatatggtagatccgcattcacgacacttgtatcgtctacggttcaaatgtaagcccactcgctttaaacgaatgggcaaatccataattagttgatttcttgaactgtgtttgtacaacttgtcaaaaccacattcaggacaacgttcaggtggtccgactgcttcaactttaaacatcatatcggtttcattttcttgtggcggttctattgttttaatgtctggtagggataataagtctgacatattattcatcctttattactctgcggtgttaaggtatcaattatagatttgatgtcgaaatcatcagtgttaaattatttttgtgaccacaaatgcacttagaaaatcccttaaagcattagctggttcacttgaatagggagttgtaaaaaagttcccttagcctgcacaacaagataatttcgaaatatctttatcgaacgtaagtgcaactaattttagcccttcagccattgttaaatatggtgctagggtttctgttaaatcttctatcgttaagccaaatttaacagctaatgatgctgcatagatgacatctcctgcattttcagatacaatatgaacccctaatacttttagtgtttctgcatctgctactagtttaaatacaccggttgtttcacggtttacaattgctcttggaacagcatctaaaggtaatacagatgtcttcacatcataccctttctcttttgcttgttcttctgttaaaccaaccgttgcaaccgtcggattcgtaaacgtaacagcaggaactaccgataaatctatttttttgtttaatccaccaatagcattatcagtaataattccaccttcataggctgctacatatacaaattgtggtcctaaagtcacatctcctgctgcataaatcttttcattacttgtttgaccaaaatcattgatcaggatttcattattttttccagtttcaacacctgctgcacttaaatttaaagaatccgtatttggttttcttccagtggcaacaagtaactgatctgattcaatgacttctctactgccatttactgttacgtaaaccctttttatctctccactttgttcaacacgctcaaaagttgcccctttgacaaggtttataccctgttcaattaacgctttttcaactgactctgaaatctcaggatcatactcctttaaaagtcgctcacttctttgcataagcgttatttctgaacctaaatgatgaaatagttgtccaagctccattccaatgtatcctgaaccaattacagttaatcgttttggtattttctttaactcaagaagtgttgtactagttaaatagtccattttttcaagtcctgaaatttggggcaacgaaggcgatgcacctgttgcaattaaaaagcgttttgcagataactttgtcccattgacctcaaccgtactagcatcaacgaattttgcttcacctttaattaaatcaaaattatattcatcaattaaatccatatatttttgattccgaagttcgctcaccaatttatccttttgcgtgattaaactagctaaatccacttctccagcggatgtttgtaaacctataaacggattgtcttttgataaatgattgatttcccctgccctaagaagagtttttgacggaacacagccaatattcacacaggttcccccaaccgttccacgctcaatcattccaacttttgcaccgtattctatagctttaattgccgaagaaaaggcagcagcaccagaaccaataataagaaggtcataattgtcttcattaattaacgccacgttttctagtgatgatacttcttcaatttctccggcttggtaatttgcttcatcaatcgcctttattgcactttcaacctcaatatcatcgggcagttcaaatactgcttcaccacgacgataactagactcaatatttttagcacctatcttttcaagtgctgattctacgtgtttttcacaacccgtacaagtcattcctgaaatgtttaccttaaatttattcataaaaaagctcctttcgttaattaatctctcatgttaatgtttctattattggacacgaatgtaatttcttttcatctggacatcgttgttttaagtcgtctaacatagtttcaattcgttttaaatcctctatttgtttttgcacttccttttgttttttagaaacaaattcgaacatatcttgacaacgaacttcatctttatctacaacaccaagtaatttataaatctcgcttaaagagaaaccaaattcctgtattcgtttaataaacccaacacgcttaacgtcatcatatgaatatatccgataaccagcttccgttcggtgaggttcttgtaataaattttttcgctcgtaatatctgatcgtttctttattaactccacatttatctgcaaactcactaatgcgataaatcatcttatttcaccccctgaatattataaaccatgtaccatagtacacggtcaagtaaattggactattttatttttttcccaaagtatcactcgtatgtgattgatacttttatataatactattgattatcctaacatcccaccagaaaatccgatttaaacaccagttgtttttaaactattaagaaagtaattccactatatattccgaagacccaaaaaatcaaaacatattaacagagaaatttctgagggagataaataaccaatctgggatggtcacatatacttttacaaaaatatagaaagacgaaatattgattttttggagcgaattcctgttcagtttaaaggttgtgatgattattataacgaaaatgttggataccctctaagcaggattaatttggagcattatctaactgaaggtggtgtgctctactttgtagtgtactcgaaagacgttagtcctactgtcacttatgcttcactaacaccaaaagtcattaagaacgtattgccagctagtgacaagaaaaaaagaattaagaaaaaagaagatatctttctcctgttctggatggctataatagcgaaattattgattttaccttatcccgctctccaaacctcatacaagtcaagaccatgcttgagaaggtcttccctgaggaaacttacccaaataccattctccatagtgaccaaggttggcaataccaacatgaagtctatcaccgctttcttgcaagtaaaggcatacatccttccatgtctcgcaaagggaccagcacggataatggtatgatggaatccttctttggtgtcttgaagaaagagatgttttatggctttgagaagactttcaagtctctggatcaactggagcaagctatcaccgagtatattttttactacaacaataaatgcattaaagaaaaactaaaaggacttagtcctgttcagtatagaattaaatcctttcaataatattttttgtctaactttttggggtcagtacaatgactcataaatatttttttgcaagttcaaatactccatgagattaataactttattattttagccaactttactaatcgtataaacattctccaaatttctcaacatcaattgagaaatttggctttttccgttgctcagttaaagcgtcctttagttgtatatttcctgttaatatcccttttgaagcataacattgttttcaatgatcgcatccgattgttgacacccattttagaacctattctttgattttcaataagcgtaaactgtttaatgttacaagtaaagttgctcccatatcagcaaatatcgctatccaaagtgttaaccaaccgggcatgaccaaaagtaatgccactaatttaatcgccaaagagaaggtaatgttttgcttgatgattgctaaagccttacggcttaattttattgtatatggcaatttactcaaatcatcagacattaaggcgatgtcagccgtttctaaagctgtatcagttccagcaccacccattgctacaccaacggtagatgccgcaagggctggagcatcattcacgccatctccgaccatccccacactttgatgtttttctcgaagttctttaataaaattaagcttatcttctggaagtaagtcagctttaatatccgaaacaccaacttgttttccgatggctgttgccgttctttggttatcgcctgttagcatcactgtttcgattcccatattgttcaacttgccgataacttctttagacgattccctcatttcatcggctacggcaataaacgaaagaatttctttttctgttcctaacaccatcaccgttttaccttgagtttgcatatcggcaattttttcttttttatcgcttgaaatgcttccgtgtaattcctcaaaaagattttgacttcccacataatacatttcattatttattttggctttaacgcctttacctgtaatggattgaaaatcctctactgttacttcattgaattttaatccattttcttctgcttttcgcataatcgctgaagcaagagggtgctgcgatcctttttcaatggctgatgttatggttattaattcattttcatttctaccatatgtcacaatgtctgttacagctggaatccctttggttaatgttcctgttttatcaaatgctatcgcttttaagtgtcctgctgcttctaaatggataccacctttaattaatacaccatttttcgctgcatttcctattgctgtaaccacagcaactggagttgagactactaaggcacaaggacaaccaaccactaatacagctaatccttgataaatccattggctccagtctccgccaaataatggtggaactactgcaattaaaagagctagtatgacaatagctggtgtatagtattttgcaaatttatcgacaaacgcttgagagggggcccgttctgcttgggcttcttctaccaagtgaatgatttttgaaagagtagtatcttcaactcgttttgttactttaacctcaagtaacccttcttcattcaaggttcctgcaaatacttcatcatttgtgattttcgttactggaacactttcacctgtaatcgcagcctgatttaatgtcgatgtacctttaaccactattccatccattgctaacttttgaccgggcttaactatcatgatgtctccaacttgaatctcatcaacatgaatcatcatttcttcattgcctcgtcgaattaacgcttcttttggggcaatatccattaaagattcaatagattgacgtgctttatccattgaataacgctctaatgcttcactaatcgcaaataggataacaacggttgccccttcaccccattcaccaataattgcagctcctataatggcaatagtcataagcgtattcatatcgaaatttaatcttcttaaatttttgagacctttaataaataacgaatatccaccgattaaaatggacgctgcataaccaattgtcggtagaacatgctcttcaccatactgctctcctaagaaccagctaactacaagtaaaagagctgatatatataccttaatgttttctttctgcttccaaaaaggttctcctcctaccctttgttctttttcatctcgaatttttaaattttcaaatgctcctgctttttctaattcttcaatggttgtcgtccctttaacataaactttagatgctccgaaatttactttcgcatcctgaacaccgggaagttctttaacattattttcaaaaatggctgcacagttagtacaagtaaatccttgaacacgataggctttcatttctttttcagactgttttgctttccctctagacattgatcttcacctctttcttatgtgccaatgcaatcatcataatttgtctgatatgctcatcatctaaggaataaaatgcaagttttccctcttttcgaaacttaacaatcccttgcttatggagcgttcgcaggtgatgagaggtatttgcaaccgtaacacctataatatttgcaatatcacacacacacagttcgtcatcttgacacaatgcataggtaatttttgctctatttttatctgcaatagcttttaacatttgggcaacactagaaatatctactgtctgtaaattaccttgtattcgattgaccttttcttcgtcataacaataaatttcacaagtattttttttaatcatattctcacctcaatatcattcaagtatttgtttgaatatagtataacccttttcattaattaattcaagtgtttttttgaatgaataaaaaaattcataaaaaaagacttggagtacccaattctaataacaaaataaccaaactgcataagactttaagtacataacattattagtattgaacttgttgaggaggtgctttatgaatcagcttgagtttcagcgtaatcacctgcaaatggactattacagcgagagctaccaagattttgaacgtgacttctaccgctactccaacatgaatattccattgatcttcctgaccgatgatatcctcaaaacaatggcgacttcacgtaagaattactttgtcctgaataaggaaaagtccaaagataaccgcgatcacttcttcatatttgaagtaagaaccttagaagagaatccactaatctatcattatacatataagaaaacaactacatacttaacacaaaaataggaactgttcaattgactgttcctatttttaatcttcataaaatctaagctattctattttgaaaaatttaccatcttcgaatatttttccaaaggaccagatggtttaaaactaggtccctgccgaccaattattaattttccttcccagatttcctcagggatattactatctgttagcttaaacaaactttttgagtttccaagtcgtttaaaatatgctccagaataaattggctcctgattactgtcatttgtgataaaagggtctttattcgaaatgtaaaaatcaaactcgttacgatctctcccaaaataaaagattggtatctcaagcatattatcaatttttctattatgaatatactcacatagatttaagtagccactttctacagttttaatcaaaccgagatctagtttatcttgctccgatattctataccctcctagtactagataaaaaattaacaatgcatggtttctagtttcttcaattgttgtccaatcatttaaattatgcttatgaaaatagccatttcttaatcctacaaaagttgacaatgactcaacaatataataatacgtttcgtcatcaataccatcagcaagtaaatccatattacgtggatagaatttctgactgttaaaatctccaaaaaaacttgtaatagatttaagatttatatttttaacttttgaactatcattaaggagtttgtcagagagtgtatctaacggtttagctcctgcaaatattttacggtttacagaatccttttctatggtatgtaaagagatataggaaaatagaaattgttcaatagatttaaaataccccatggctattgatgttaaatcaatattttctgcattttgaagagagtaaaatagttactcccttatatgctttcgacattgattatctgaatattcctaaatatgtcggtctatcaaaggagcagattctggaaaactaccgcatcctcctgacctatttgaatatcccatggtttctcgcattggatatgccggatttccctagttcggctagtgggcttttccactttttcgaggtcaagaagctttttatgctggactacctgatcttgatcttttctggaatgggcacgctatggtttgtacgacatctaaataggagacgagaatcttggcggctcctaccctacttccgccagggaacccttattccccttgctatccttttggctctcctggttagcttcgacacgctgtttgtgcttttccataaagttttctttaacaatgacgcctggctcttcaatgccactactgatcctattatcttagctttacctgccgagttctttatgcacagtttcctcttggcctttggattaatcgaagtcttcctaatcctggggtacttcactactaaatatcgaatctctgccccaagccgttgattaaaaaggttatggttcataagaaaaacagggctctccatcgaaagcatgggagccctgtttttatcgaaaatttatcgatctatgattttccttatacagcatactagctggtctgacccgattctggaagggggtcaaaccagccagtgttttttcgttcctgcttcgttttatttcggctctaatttcaatgtcatagcattgatggcaacaataacggtcgataaggacatgaggacggcgccgaaggccggacccaaggtaatgccgataggagcaaggaggccagcagcaattggaatcgcgataaaattgtagcctgctccccataccaagttttgtttcattttacgtgtcgtcttgtttgctaactcgataaaggattcaatatcccctggatcagactgagtaaggataatatccgcagaatccaaagctacttgcgttccagctccgattgcaatacctacgtctgccaaggcaagggaaggtgcgtcattgaccccgtctcctaccatgataaccgtcttgttttggtttttcatggactcgaccagcttgtacttatcttccggagattgattggcttggtattgaatacctagaacttctgcaactccttgtgcagcttcctcgttatcaccagtagccatgagtggttcaattccgtattttttcagcacctcgatcaagtttctgctggtttctttcagttcatctcccaatgcgacagcgccgattgcttcattattttctacaaggatacttaaagtagcgcctttcggaatatccatacgcaatgcttttccgtatgccttttggctgattaattgatagtggtggccgttcgcctccccttctattcctgctcccgaaacgatttcaatggagtcaaaggaaactgacttaatgcctttcgcttcagcgtggttcacaatcgattgggcaatcgggtgactggagcccgcctctatacccgccaacaagcctgtaatttcttcttcagaatatttatcactcaaaacagtgacgtccaacactttaaattcaccagttgttaaagtacctgttttatccaataccataacatccgctttagtagttaattccaaagcttctctatttttaaccagtaatcctcggcttgcacccaaactagtactacgtgatactaccaagggaatagcaagacccaaagcatgtgggcaggcaataactaacgcagtcacagtaaagataacggctgtaggcagatccgcaatgatcgtccagattagtagggcgattaaagctactacaaccgcaatgtagaacaaccagctagctactttttgagccacattctctgctcgagaaggttggctttgcgcttggctgattaatgtctgaacctgagaaatgaaggactgatcgcccgtctgctttatttccacatagaggactccgccaccattggttgatccaccgatgacctcatctccggtttttttttcaattggtttcgattccccagtcacaagcgcttcgtttacacgagattctccgcggataatgataccatcagctggaacattttctcctgcttgaacacggataacatctccaatctgaagttcagacacagggcgagtctcaatcgaatcgtcttctaaaacaacatgagcatctttcggcaccaactcagccaatgctttttgcgcgtcccctgcttcacccaatgccttcatttcaatccagtgtcctaataacatgattaaaattaaggttgtaaactcaaagaagaagtccatgacatgctctccggtcacataacgagcggccactgcgtaaacactataggcataagaaaccgttattcccaaagtaatcaaggacatcatgcctggagcttttgaattaaactcatctttcgcacccatgtagaatggttttccgccaaaaatgtatagaattgttgccaatacagctgctacaacgtctgcataaggaaagataatttggaaaggcaactgaatatccatcataggcgtaatgagtaagattgcaattcctaatgggagtgacttcaagaaaatctccttaaagctaccgtgatggtggtgggcatgccctcccattgcgccatgatccatttcactgtgatccatattgctgtgatccatctgactatgttccatttcattatggtcgtgttttgagtgatcaatgtcgccgtgattatgatgactatgtgacgaatgttttttgttatttctcatttttaattcctccttattatattagagactgattttaaagttttagaactttctcatctaacactacatataattctcacgaaaagggttctatactttatctctagctactatctatgaataaatgttattcgtactttatgcacttaatactgaatagttagtttctgctaaagcagcattgagcgtttcggtatcaatctctgtttgactttcaagtactgcttttttagtcgctaaatcaacctctacagattcaaccccttcaatagctgaaaatctttcttgtaccgtgttcgcacaacctgcacattttacgccatctaataagatttcttgtttcattattttattcccctttttttatcttctcctattatatagaataggtagaagtttaaatcccagataagctacgtgttttctaaaaaactgctggtttgaatcgtcttaaccgtaaagcattgagcaagaccgatacggagctgaaactcacggcgactgccccgccaacattggactcatcaatagtccgccaaaaatatacaaaagacccatcgcaactggaatacctacaaggttgtaagcaaaagcccagaacaagttttgtttaatgtttcgtagcgttgcatgacttaaatcaatcgtagtcaatacagcggttaaatcattacgcataaggacaatatcagccgattcaatcgccacgtctgtacctgatccaactgcaattccgacatttgcttgagctaatgcgggtgcatcgttaatgccgtctccaaccatcgctaccttcttgcctgcctcttgtagttttttgacttcctctgctttatcttcaggtaatacttcacttaatacactgtctatacccacttgcttagcaatcgctttggctgttcgtttgttatctccagtaatcatgattacttcaacaccgcgtcttctaagtgctttaacagccttcatggcaatcgcattgcccttctgtacactgacaatccacttcttctactgcgaaagatttttttatctctaatattttctctagtcgatctatatcatcgaagcttaagacatgatcttcaatgatgcttcctattacatttccgactttctttttgcaaatacggttaaaaatatcttctgcaaaatcccttacggcttctttctctacaatattggcagtgtaaataaactttctaccttcttgctctgtatttagtacgcctttttcaactaatcgacctaagatcgttttgatagtggattctgtccagtccattttttctttcaatacagagatgactgttttactagttactaaatcatttgcccaaactacacgcattacttcccattcagcatctgtgatagaagtattaagttctattgtgctcattttcctttcctcctcgttgtttacagatgtaaacgaatatgttcaagataagtttaccattgtaaacgaaatatgtcaaatcttttttataaatgtaaacttggaatttttttcaaaaaaagttaagttgtattgtatcaatttcagaactcacacttcggttttagtactcattttaatacaaattttctaagcaagaaaaaaagtcactcaataggtgactatagaacgtagacaaactctatttttagaaggtgtaaattaaaattatttaattaccattatttcaactaactcttgaaacgctcattttatcgtgtatcaggagtttttcttctctagaagaacaaaaaagattgaagaaaaattgtcccaaatggactttttcttcaatctgaaagccccatttaaggggcttttttatctataaaataaagttcagaaaagtctcaatcgtgccactttcatacatgatgtatagtccaagtggaatgaatactaacggcacaatgattcgctggtatttttcaattgtctcggatattaacggaatagaagatagcacccaactaagctcgcaaaagataattatgccgattgcaaacacaagcaacaccacgagggtctgtgaccaatctaacgaagcaaaataaggtatatagatacctaaattatctccgccagatgcaattgtcagcaatgttactgtccaaaacagttgatttgccttgctttgttctaatctttcaataatttcttcctcttcttcttcctcaccttctccaacaattgcaaagcgaatccctaaatagatagggattaaaccaagcaatccaaccatccatgcttcaggcacgaaattgacgacataagcagcaactaaactcgcccctacaagtaagccagtgcctagatactgccccgcataaatatgccatttctgtttattctgtgatagctgtgcaaataaaataattaaaacaattaaataatcgatactggtggaaatataaacaccaatagcagatatgattgtctgtcccataaaaaaaactcctgtattagtcagtaataaatcagcaaattttaagagaacacagacacattaatttagctatccctaatgggtaatgtcgaacgtaggaaagcattttactcctcctcaaaacatagttacaaagtaatttctaactggaattcggtgaccacttccatgtaaagtataacccattatactttacttcgtaaatgtgggctcgctgaggggtcttgcagacagctatttcggctcttttgagccgagtatcagcgcacccttacctcattcaaatatatttttgaatgtattctaacattaaactttgtagatgtcaacttcagctccgccaaaatatagataagaagttagtgtaccaaatataaaaaagccctgccatccaaatgataacagggcttaacttcaatatccaaaggacatattcatctaaaaaaggtagatttcttattgatttatattgcaatgtaatgaacttcaaaaattcaaaaatcgcttaaaatcaatgttttgacgtctaatgacgcgtagtgaaccacttacttaacctcagtaaagaaaatatagctaaaatagattttgactttcttaatgaggcacttaatgcaaatattcgtttgaaagaattagtagatgaactaaaaatttcaaaagaactggacagtaaaggttggtccaaaaaagactctcgaacgataaaaatcttgtacgatggccttatcaataaacatatagtttccctagatcgtgcagattataacattatccaagtcattccatttgctaatgtacatgtactactgtttttaataccagaaagggagaattctaaaaattatagaatatacaactacagtgattatgaaatggagttaatcaatgaggataggcaacaattttcaaaatatgaaacagttgatttagaccaattgatacttgttgatatttttaatattgatgactacatttcatcatatttaacaatataggatatagagaatctggatcttggtcttttaaagttgataaactatgctgataataaaagcgatagacatattttacaaacctgtttagaatttgctcaaaaaattgtagaatcagataaatctgaatatagtattctcattttactacaaataaaaaaacgattaaacatattaacacaaatggatagcaactatcttcattctctaatgaatcaaagttcggtagaaattaggtttgctgcagcctgtattctaggtaacaaagaacaagccagatattttttcgataaagaattcgctgatgaacaaaaagaacgatttctggaatatccgatttattacctccttagcctagactaataagttttaactataatgttaagttagagaaaacattttacaattgttttctctaatttttcttttttagtttaagattaataaataatatttttagcacaaaatttttactacttgcatcttaaatcttttatgatataattttgttagtttataaaacaacaatagttttcaggaggtaatatgttttctggtaaacgattaaagaaaagacgaataacacttggctattctcaatctgaactagcagataaacttcatataaaccgctcttcttatttcaattgggaaaatgaaaagactaaaccaaaccaaagcaatctcaaacaactagctatcctattagatgttcctgaaacatatttcgagtcagaatataaaatagtcaatacttatcttcagctttctttacagaatcaggaaaaggtagagaaatatgctgaggaattacttcaaactcaaaaggttcatgaaaagattgttccactgtttgctgtggaagttctatcagaaattcaactatctgctggtccaggtgaaggtctgtacgatgaatttgaaactgagactgtctattcagaagatgaatacacaggattcgatatagcaacatggatttctggtaattctatggaacctgtttataaagacggtgaagtcgctttaattagatcgactggttttgatcacgatggagctgtctatgccttgaattggaatggatcgctctatatcaagaaactctatcgtgaagaagatggattccgaatggtgtcaattaacccagatgttgctgaaaggtttatcccatttgaagatgaaatcagaattgttggtaaaattgtaggccacttcatgcctgtgattggaggttagtaatgtcaagacagtttgacgacattatatttattaaagcaaatagaattattttattactcgaccaaaaagaatatgatgtaactaaccatttaactgaattggttgatgaattagcaaaattgaaatctaggtgaatactatgggctatgtcgactactcaaaagaacctcgtagcgatattgcttttgtcgatatgaaatccttctatgcatctatcgaatgtgtagagagaggacttcacccgcttcatacttcactttgtgtgatgagtagggcagataattcagctggtctaattctagcttcttctccaatgttcaaaaaagtctttggtaaaggaaatgttggcagagcctacgacctcccctttgatgttcataccagaaaatttaactactaccgtgctaaaatttcaggattgccaacggatgcaaaatttgtttccttcatagaaaattgggccaagcgtacatttattgtgccaccgagaatggacttgtacattcaaaaaaatcttgaaatacaaaaagtatttcaaaattatgcagatccgacagatattctgccctattctattgatgaaggatttattgacttaacttcatcgctaaattattttgttgaagacaaatctctgagtcgcaaagataagttagatgtggtttcagcaaaaattcaacacgatatttgggaaaaaacgggtgtctattcaactgttggaatgagtaatgccaatccacttctagctaagttagcacttgataacgaagctaaaaccactgctaccatgcgtgccaattggtcttatgaagatgttgaaacgaaggtctggaatattcccaaaatgactgacttttggggaataggttcacgaacagaaaaacgactaaacaaattgggaatctacagcattaaagaattggccaactgtgaccctactatcttgaaaaaagaatttggtgttattggagtacaacattggtttcatgctaatggcatcgatgaaagtaatgtccatgaaccttatcgccctaaagcagtcgggattgggaattcgcaagtgctccataaagattacactcgtcaaagtgatatagagcttgtcctgcgtgagatggcagagcaagttgcgattcggctacgcagaagacataaaaaagcaactgtagtcgccataaatgtaggctattcaaatttcgaaaacaagaaatcaatcaatgttcagagaaaaattaacccaaataatcgtacgcttgtttttcaagatgaagttgtttctctctttcgttctaaatacgatggaggggcagttagaagcattgctgtaaggtacgatggattggtggatgaaaactttgctgtgatttctctttttgatgactttgaagaaagcgaaaaagaggaaaaattggagacaaccattgattccattcgtgatcgttttggatttcttgctgtacagaaagctagttctttattagaaaattcaagggcaatttctcgcagtagattagtcggcggacattccgctggaggattggagggtttaaaatgattgatagaagttatctcccatttaaggttgctagagaataccaagaccgaaagatggccaaatggatgggcttcttcttatcagaacatacggcaggacttgatagtgagcttaataaagttgactatacttctgagttatcaatttcagataaactactgctgctcaatcaattatacagtaatcagttgaatggtatcattgcagttcctggacaatattacagtggaaaagttgacaatctgacttttaaccatgtttcattgaagacaaaaacgggctttgtcagcattccaatcaaggatattctttcaattgatttggaggtggaatatgaatcagcttgagtttaataaaaatctattacaaatggattattttagtgatagctaccgaaaatttgaagaggatttctatcgctactcagccctagatactccacttacttttttaacagatgatattatgcttgccatggcaaaatctcaaaagccttattttaagctaaataaggaaaattcgaaagaccatcgtgaccattattttatgttcaatgtggaaccttcacgagataataatctagttaggctatattgttacgattcaacgaagacacatatttcaaaaaacaggccaaaataattggtctgttatttgttattattgctctctcgcctaccttgtctaaacctctcaatgtttttttccaattgttccgtgtgaagtttatttttcgcttcctggattgacctatcaagactttgatcctcgtcagttatatcgctttgagataattcaacgctcgtatcaggcttaaaatttgtatcaaaaaccacatctaggagttgttctactttggttagttcactatctgacatctctgatagtcgatgaatcagtcgtttgaattgatcctggttttgttttttcttttgaaaaaatttcattatattctccttcaattgtaaaaaggtagcccgcataggactacctgacttataaatcatcaatggctactgaaatagcctgcaactttttattttggattttcttttcatcaatcaattgatgaagttcttcaatttgcttctgacaggcggaaatatccttgttgttttgtgcaatggtatcagccaagtgttgtttatagtcacttgtgatatttaccttcttcggctgattttgtttaacggttgatgcgagcgtttgtacatcttttgattctgactccttttgttgctgttcaaaagcagccacataatctacttcttcaattggtttttcatcctgtttatgaaaaagtgctgcgattttagctcgttcttcatgggacgatgttggtttcacatcgtctagtggctgatcaaaattccatgttttactcattctgtatcctcatttctgtaatttgggtgtagtgtggtttctttaccaaaggcttgctctagtgcttcatgaaatgacaactgacttgattgttgtcgtttgataaaggtgctatacattgcagtttgtagttggtctcgatagtgttccaatttctcagtctcacgtgagaccttttcttcttgcctagctactttttcagccagacgttcaatcacactcatagggtgtcctccttgtcactttctagattatgatagcggacttgattttgttatcacaattccaaagcgtgctctcgtttaggtggaggatgattcttattgacttgtgcttgggctgactggataagatctcttaaagataattccttttgtcgtttcacaatatcattccaatctgactttgtttcaagtctttgcaatggtggtaaatcttgaaaaatcggaaatcctttatctgacagtttctgataaaattctcttcctgcttcatcgttatcaacagccatagttatgacgtttgaatgagtttgaaaaaaggttgtcgtctcttgtattgcctgaagataatggctaagtctaattggttttactgtatctagaaatgccaatttcccctgttcctctgctgctagacgcaaagtctgataagcaatcactgaaagttttaggccttccattgaaatcaggcgaacatctgatagctgcttttggtgaagttgataataactcatcatatcgataactgattcacaaaaaatgagtcgcttaggattcccaatatcgaaactaataccgacatggccatgagatcctttcatgatttttttgagataacctcgatcgtatttttcttcatttttgacgagaccttgaaggcttgcggcctgtaaggtcccattatggtcaaagcttttaaacactaaaactgactccgcttgataagtagcttgagcaagcaatccttgtctgccaaaggaattaatagtctgattacttagtccacggatgtctttcaagtaagtacgtgcttgctgaaagggttcttcacgcaaataatattggaagggttgataagtttcttcaatcaccttagcttcttcaaagcctccagtttcaaggtaagacaaggcttttttgaaagacactcctgccactaactgtacaaagtctatcacatccccttgtatatctcttgaaaaccatttgaaagtattggtatccgcaaaaatccgaaaggaatcatggtctgggtgttcataaatttgtcctgataaacgtctgaaggaataacccaaactttcagccacatctaaaatggccttttgttttactattttaattcgtgtcatcttgtctccctatcaaaaaagcagaagactgtctcctgctagttgttctcgcttgttgtagttccttggatcgttggtatgctggaattggctccatctgttgcttctttcatgtcctccagtttcccattccaaatggtcaactgattaactagaagcttgtcggaaactttggagtaggataacataactgtcttggtttctgtctgagttgttcgctgttgttgctcactcaaatcagaaacataagttacttgataggaaacttccgcaagtgcaacatggctttctgtattgacatagatactggctgattcaaatcggtagtcaagcatatagtctttataaacttgattgatcgctttattctgatttgcttcctcttctgaaaatgccgagtccgtcatgtagggtttgatacgagcgttattttcacccagctggaccttggtgaaatattgagtgagaaattcattgacaagctcatctgataggactgtcgctctttcctcctgctttttctttgacacaagtttattggcttctgctcgtatttggttctctgtttgctttgaaatggtttgtgagccaatcgtctagccaatcatgaccataaaactgactgcgattaaacctcctactccaatcagaaatcgagctttcactttatttaacatggcttactcctctattagtgatagcttcatcatatcaagattagcttggagattttatcacaagaaaaaggactacccattggtaatcctccgtgttaaactattctatttctccaccacttcataataatgctaaaaacaagaaatagattcaaagcaataaaaaatcctgtaaaactccaaactccattagttgctaaatcttctgaatagaggtatctctcagtaaagaagaggtaaattccatagatttcaataaagactaatccactgatgagtccgataagaaacaaagcacctgaaactttcacaatccgataaaggacaaacaacatcagtcctattgctgcgaaaatcaaaagactttgtagaatttgctccaacatcttacacctctttctaggctaattgcttacgataatagttggcttgttcctggtcaagttcatcaagttgggtaaccaagtcaaggtattccgtcttcgtcacctcatctaagtttgaaaaatcattctcacgacttttgatgatgagttccagctgtccagtaatttcacgctttgaaaaactgtaatcaaaggtctcatcttcatactgttcctttaaagtttggtagtttgccctatcttctggacttgtatagccttgtgccaaccattcttcaagtttataacgcatttcttctagtgtttgggtcatgatctattctccttttgtgatttcttgacttcattttaccgcgttcaaaattatttgtcagccttttttcttatatctcgagtgctatttgttgcttcttttggggtgttgtatcttcactaaacttggccaaagctgcatctatctcttcaatctctgcttctttttcaaccaagggagctaaaacatcatacttagcctttacaagctgatagtcctcttcctttggaaagactttatcaacttctactttggctactcgtagcttatcttttaaatcctttaccagctcttgcgtcttttcttggtcatctataatatggtcaatggcattactaatccgttgaatggttcccacgtctgatttcaaatcaagggcgacagtatactggttatcacctacaatcattaaagaaatggtttctggtaagggctcactagcacctcgtgtagtcatttttaaatcaaatcctctaaagctggcaagtgtcctgacttccttggtctctgagcggttataggtaatgagttttcgcagatagtccccagcttcagcacgattatccattgcttgattgtcaaatcgcatgacaaaatcttgcgacttggttgccaaagattgggcaatatctttatcatattgactcaaccgtttttccataatagggaggtgcttctcgctataggaaatggtatggcgatactcgtctttggagcgattaaaggctcgtttttgattctctaaaactgtcagttcattttccaactccattttgagtttgagataagggttcccagttgccaatgccttaaagtctgaggcggtcatggtttgttcatcaatgtcttcagctgatctcacaggatcttttgaggtcattatctgggtgatatactttagcttattctcctgcgtctgccagaggtaattgtcaaagctccctttagtaatatagtgataaatatctacctcctggtgcatgtttccttgtcgaattagtcgtccatttcgctggacaatgtctgagggcctccagggaacgtctaaatagtggacagctttcatgcgagattggacgtttaatcctgttccccctttttccgtagaagccatgagaatccgtacttctccactattgaccttgcgtgacagagagtttttcttctcatcagtattggcatcatggacaaaggcaatttcttcttttggtatccctcgatcgacaaacaagtccttaagttcattgtagacatcaaacccttcttccttacttttaggggttccaatatctgagaaaatcatctgagtggctttgtctccagctccatcacggtaaatccgctcgacattatcgactacttgaaggattttctgattatccgataaggagtaagtagggtcaatcaaccgcatatcaatagctagttttctggcttctcctgtgattttaagcatgttatctctacttggatcaacactacctgacttgatagcgtctgaacgctttaccagctcttccaaatagtatttctgagcttgcgttaactcgctttccaccgcaataatcttagcttccggtactggtaaatcaagcatgtctgaggtctgaatatcggcagtttccttgtagattcgcatgagttcaggaaggttgacaaatttcttgaaccgtttcttgggttggtacttatctcctgtcggggctagttccatggagttttcgatattcccaaaagccccaacccaggagtcaaaatttgataccaggtatcgttccaagacatcaggttgaatgtaatccatcatggtgaaaagttcactaatagagttagaaactggtgttcctgtcgcaaaaacgacatttctatctccatgctctgcctgtacttgtctcaccttcatctccatatccacgttctttttagaagttgtgttggtgattccagctacattcccaagtccagtgattggacggatattcttgaagtgatgagcctcatccacaaaaagaaaatcaattccaaggttttcaaactcaataaaggtatctcgctctagtttttggagttcttccaactggtgttctaatcccttaatcgaacgttccgcttctttcaccgtgtaatcactgtcacttcctagcttgatttctcggagttgctcaagtttgtcattgatataggtgacctgtttttcacgactcatcggtatcttctcaaattgtgaatccccaatgacaatggcatcatagtcccctgtaataatacgggacacaaactgcttgcgtttggctttggcaaagtctttcttagtagtcacatagactttcttggtagggaaaaatttcatgatttcttgaccaaactgagcagtcagactagacggcaccacataaagtggtttatgtaccattccgagttctttcagtttgaatcctgccccaagcatggtaagtgttttacctgaaccaacttcatgagctagtagagcacgtttttcctcgacaattcgttgaatggcattcttttggtgaggacgtaaggagatattctgagcaagtccatcaatggttaaatgactaccatcataggactttgataccgtacgattgtagagcctattataggtgtcttcaatcatttgttggacttctggatactttgctacaaaaccttgaaagagttcttgtaggtgtgtttccttggcacgcaggaccgttgttttctctacatccgtcacattctttttcttatccccttcgacaacttgttttgtgatggttggttgattggaattcaggagattttcaaagatttttcgaccactatcatagcgtgaagcagggacacctaaactcctatccgttgcgttggaataggtgtaggcaaacttagattggtaagtgataaccccgtcaatgggactgacttctaggactgtcgctacttcttggtctgacagttcataggctttccccataaaggtttcttgggcaaattttccataaacagccagaggaatccagcgtgaaccgattcgataatcaatgtctgccaaagtaatacgggctggtttgatagcttctagaagtcccgcataatgtgaccagttaaagtcctgattgtcttgtttgacgaatagatctaccacttctaacttagtgacgacatcccctgaaagaaagtcttggcgagaaacataggtcaattctccattcaaatacttctcaggatcaggcataatgaggtcgcctaactcctcaatcaaggtcatctgcgattcaacctgatagatagacatcatataagcgaaatcaacacctcgtccgtcagccaagctcgaatttaaggcatcaagggcagtatgcacctttttaacctctttttcaggacgcactagagccttctcaaaggcaagggatttagtatagataacagactttccacttggatccagactttcatcttccaaactagcaagaagcgaatacttatcatcactatcaaaaagattgcggttcacagcactattcaaatacccatagtgtttgacaaagctatcataggtacgattgagtttgcctaacaagtggttaaaggtctccttatcatagtcataatagcgttgaatggcaataacttcttggtaggcattgcgaatatcgaccattcctttgatacgtgccacttctttataagacaatggagcttcatagaaaactgtctttttataataccccttaaactgaccacgtttggctgcatcatcggtcacatagacatccagagcagtgttatcagtcacttctaaggcattaaagcgatcaatctgcttttgagaatgtttggtgtcccatgctttgaagttgccctcttcatcgacatagtaactgatttcttccgtcttggttccgactcgaatgcctttgttatctcgatagtaaactgtagacccctgataaccaaaactgtactgacctagattttccctcatttcagctggaatggaggtatcattgacttgtttggtcaacacatctgggttaatgatgacctcatttctatcaatctctcttggggccttaacgtgatttagagctgtttcaacacttgcaatcaagtcatcactagtccccttaacagaaagtgttcctccgttaaaattcctgacctcgtaggttcctagcacctggctattgtattctccatcaaaataaggattgagccaaatgcgactatccttgtcatagcgaatggaacctgaaaaggctaaatcgtctgccacatatcccttgtctaagtgtttctggaagaataacatatccgttgtgacactcgttcctgcaatggccttaaaggcagagtcaggcagtcgaaccccaccaagaaattcagttgtctcacgaatatcttgtaagatgttttctgttcgcttatccatagttcctgtggaagagataatcgctacttgtccaccatcatgaagcaaatcaagtgactttttgacaaagtagtcatgaatcatgtaaggcctatcgtacctattatccgcaattcgtatattggcaaagggcacatttgaaatcaccaaatcaaaactattgtcgttaaaagccaccgtctcaaatcccttaatttcaatatgactattgggatgaaggtgtttggcaatagctcctgtaatagtatctaactctacgccatacaactcactcttttctcttaagtgttttggcatagccgcaaagaaattccctgttcccatggaaggatctaggattttgccacctgtaaagccatctctttccaacttatcccacatctgacggatcagggatgggtctgtgtaataggctgtcagggaggactgtttcatatccgaatactctttatctgtgactaggctcttcagttcttctcgttccttagaaaattttggattatagtcatcaaaaaattcattggctagtccaccccagcctacatacttggcaaggagttcttgttcacttggtgaagcattgcggtgctctacttctagattttttaccaaacgaatggccacaatgtttgtctcaaccttatctctagcagtcttaggataaaagtccgtcaaatcttctggaaaataaaagtccgttactggaatctctggaattgtttcgacgacttcctcttcaggaatttgattatctgtttcttcaagatcagtatcgttatgaccattttctgaatcatctggttccaatagtccaatactctgaactggctcctcttccagaaatgagaataggtttaattcttggtccgcttcttctaactctgtttgtggttctgcctttggctgatgaagtgcctgactgacttcttcccaggtcctcacataaagaactggattttgttcaatgatatccgaaaagtcattgactaactcaatccgaatcaaaccgttcaatcgagcatcgctgaccgacatgacctcaaagtcctgtcccttataggaaaccaatgaccccagaggataagtgtccaatactctctgaaccagtggattttccgcgaattcttcatcaactacttcttttccctcagctttctctagcttgcttttccaatctctgagagttaaatctggctgattacctttatctttttcaaattgctccgcatcttctctgctgagttcttggtataaaaaggcgtaggcaacttgtcgcagctcttcaatggaaagctggctaccaaagaaaaattcaaccttttcatgacttagtcccatttggagtagttctgtcgcaagggctagttgagttaccgaggctttgggataaccacctagtaaagcaaggtctgcattttttaaacgaaaacgacctgctgcatccaataaaataccgactcggtctgggtcaaactgagataaatcaatccctagctgagtcaatttttcttgattttctatcctaatggcttgtccaattttttctaattccttttcttcgactgtagtcagcgttcgtttcagctcatagggactgccatcagcttcgagataagtaagtaattcctcgccatcaaagactggtgtcatttccatctctgtgtcaaaatcacctcgtctaaaacttgggactttggaacgttcatttcgaatttggtcaaaatatgttagaatctcaaatttacgtcgtaaggataactcttcataagctggcagatgactggtttttcctatttgaacatctagttgagacaaatctacatccaaactagcaataaccagagagccctcttctcgaaaagatattgcttgatgaacacttgttttgtgctcatcaacagtttcttcattttctagaacagtttcatcagctctagtttcaagctcaggctcgtaagttaagagaaactgttcaatatctcgactaatacgatccgctaaattattagccacacgatacacattgaccaaattagctcccctactcttttgtaagagtgaatccggcgatatggtttggtagtgtccattggaatccaataattgaaaacgagtggccagattgaacaaggccacttctatcaccaagtttttttcagacggcgatagtttatctagtttttgaagaccactttggccgaaaacttgtgtataggtcaatagatcatgagcagtatcataaggactagcctggacaaaagctgaaacatctgtctcaaagtgaagtacttgaacagacttatttatttcttgcctattggtcataaactgatgaataagactatcccactcctcatcaaaatgctctgcttggtaatataaaaatgcctcaagcaaggctctatcacgaggaatagtggctctcatcatttgtagtaagacttcttgattcattttccctcccattttaaaagggctgagagtgtttctcagccctttgagttaatctaggaccaaggttcgttggtctctttcttgtggaataccttccattacaattgccacatagtgttgtaagaaatgacttttctggtctagtaaatctttttgcaaggcaaggtgaaccaaatctccaaaataatcctgactggaaatagccaagtcctgttggatcatggcctgtaaggtttcaaggctaagtggtgaataatcgtcactatccaaaacctcatactgttccaaggtttctgagagactatttgaggacattaaatccataataaaattagagccttcacctgttcggtacagcttttccagaatgtcagtcatatctgcctgtacttcatcctgataactatcaactttaactcgtagctcatcacttatcaaggataggtcatcctcatccatataatcttgataaacctgattgaggattgttctattagaaatacttaattccaaagagagaaaagccttgataaactcttggtaatcgaccttctccatttcagacaaagcctctttcatggtgtcaaagttccaagtcattgtacaactccttttgtgggactaatggtgaatgtccagattgtagctcctctaaatcagcttgaccatcaccatctgtgtcaacagactgcggatcggttcccaaagctagttcctgagcatctgtcagaccatcctggtctgaatccttttcataaatagtttttggattcatctacttctcctcctttttcttcagtccataagccgtaccaagtagaataccagctccaatcaagcccaaaagggattcctgttcccctgtatttggcaaaatacttgctggaacaggcggttcaatagtctcaattggtggttgaggtggagtgggttgatttggacttggttcttcaggttgaggtgtatgtgttacaactgtatttgagctaatgacatagccattcactgtatggagataggtattctccacctgaccagccgcaatccgtttcatttgaaggtaaacatctgcctgaaaggctgaatcatcagagacagtctctaagaaggatttatcaaatgaaattgacacgaggccattttctgtatctacctgttgcaaggtgtatttcgtgacttctgtcccctcttttaagacagaaccgtctttgaggatgacatccgtcatcagatagctgcgataaacaccattatactcatcatgcttttcatcatagttatcttcaaaaccatattcaaataaatcagtcgcacgattgcttggaatcatcgctccaaccaagcgatagttaaaggtttgatgcaaggccacttctttcccgtcaaggctggcatctttatgagacaagtcgatcaccacatctttttgtgggtctaattttggaacattattaaccactgtttccgtgacataggccaagccaaaatcaatttgataggctgtattttcatactgaccacctgttttggtcaactcattttttaccgtcatcggaagcgtgacaactaaggtttgaccagtcttcacataggtatcataaaagacttttggatcatcgctactaagaacttgaatggctcctttaggtgtaaactgacgtttagccatggcatcttgaacaactttcggagcttctgacaaactagcgtaggtgctgacagagataccagatacacgattgccatccttatccaaaacttgaatgccatcaggatttagggtaagggcttcttctgggtaatcgtctaccatgtaaaatcccttggcaagaacatcatccgtcacgaccatatccttgtattgactgtaatccaagacaattttgtaataattgaccgtattcggaagaacagtctttccatcaattgaaataccttcttgattggtattagacttatgtggagttactttagggacaaaattggtcaccgtattggtttcataggcttgcccaaagtccacctgataagccacgttttcataagacttccctgaattaagcatggtttccaaaaccgtcattggagtgacaatggtaatattctcccccttggtcacataagattcaaaaaaggcttgtgggtcctcaggcatgaaaacttgaaaagctcctttaggctgaattttttgtttggaaaaggctgcttgtagcgttttaggagcttctaataattgagaataagacttcaccgtgattcctgaaactgttttgccatcagatgtgacaaactgaatagctgcttcatctggcaataaagcttcttctggataatcatccacaaagtaaaaaccttgtgcaatctgagagttgtctgctttaatccctcggtattggtccaagtcccatgaaagagtatagtgattttgagttcccactagcatgggcttcccgttgatatccactttatccttgtttaggttttgtttcttgggttctggtgaaacaagggtgttggtcacttccttggtttcatagccattgccgaaatcaacttgataagccttgtttgtataggtctttgtctgaccatagagactatctttaaccgtcattttggtcaaaagagctaaagaagttcctgtttgaacatactggtcataaaaggcttggttgtcatccggcataaagacttgaaaggcacctgtcggtgtaatcttagcacgagccaatttatcttgaaggtctttaggggcttcatttagggaagcatagtttttaactgtaattcctgataccttctgaccgtcaagggttgtgatagccgtgccattttccaccacatcaagcacttcctctgggtaatcgtccacaaagaagaagcctcgtgcaattgtctctttagcagaacgatctcccttatactggtccaaatcccaagtcaaacgatagtggttggttgtaccaagggctacgaccgtgtcattaatgaggacaccatccgcattttcattgtttttatctggtgtaatgagcgtggttgtctccccatcacctggtgtacgaaccgttacaacatttgaagtgactgtgtaagcattggttgtacccttgttcaaaaggagtttgtaactattggaataggttgccccatcattttgaacagaaccatagagttttggggcggtcaattgataaacctgagttaaatctttatttacctcctgcaacaagttttcctttgcggttaaggtcacaaaattcttagtctcatcaaagctaaggacatagtttccattctctttttgtgttgtttccttatcaaataggtaaccagcaggcaagtagtcctcaaaaatgagactagtcgtttgggcacgattgggcgataaggcatcaactgttaagggataaatcaccgttgaatcttttgcgacagttttctcatgaagattagcttggtcactattgaccacttctttcataatctctgaagttgtcgtcaaacggtacgcatgataatggacagttggtacttgtggtggcgttggaagttcttttggaataggtttgacaggcaaggttaccttggtcaaagttagactaggctgcactacttcatccaaaggctttggtgtgaaagttacaggcttttctggtgtaaatgtttttggtgtatagatatctggtgttaccgtaataggttctggaatgggttcaagttccaccgttacatgaggtttgggactatatggtgttactgtacgtgccactggtagggtatttaaggcgaaccagtatgacaagccaacattctgtggcatatcgccttggccaaaggttactgtgtaggtattacctgatgtaactgttgagacaatagctcctttataagcataacgacttgatgtggtatcccattcctcaggtaaattcaaatcacttgcacggttggaacccaaagaacgtgctagaccttcattagtcacttgaacagttgaaccattaatcggcacaaatttcccagatgaatctttgacatattctaaaccaatgtcattatgattgagggaagagtgtgtgaagactcctggcttttctttggagaaggtaacttgtgaaccgtcttccaagtaatacttggcaactacacgaaactccatcttgtctgttcgccagtcaccgtttccgtcatttcgataggcaataaaaccctcggttggatcatttggcacaaccaatttcacggcattggttccagctggtgatacaaggttggtaatatcgtaagtcacacgactaatctttttaccatcaaatcgtgcatgttgaagattttgatagttaaaactaagagtctcacctgttttgaacatgtcatagacaaagaatcctgttgaatccaatattcttgagtagcctcccagcaaagcatcgccagttgaaatgatctgatcaggatttcgggtaatggccccatgttgtgcttggggttcaccgttgttgagattgagggcttgagcaagggcttcagaaatataaccttcttcaccttttgaaatctcggccaagtcacgttgatagcgttccatttctttggtattataggcatcaatcgcttcattctcttttctggctgcggcttctttttctttattacgttttgtaatagcttcaatctcggctgcacgatctgaaactaattgttgtttctcctgattagcttgatctactgcggcttgacctgcacggttttcagcatcaacagctgcttgaccagcctgattacgcctttcaatggcttcattatctgcctttgcattagcaagtccagcttcattttctttttgaatggcctgatttttcgcaacaatatcatctgcctttgttttctttgttagataatccgctacagcttgttcgttagttgattgaatggtttcaacagccttgccatagtttgtatagtcaaggacagatgtcccatttcctgatgaaactacttgttcttttactgtcacatcagcatctgcataccgagcttttaggtcattgactttagtatcaacccaagcatttgtctctttaccagtttggttggccccctcgtaggcctgtgacagctccttattttcctgttcgatgcgagctttattcgattcgtatgtcgctttatcagctttgtaggttttagtgacttcattaatagtctcaacctgtttttgggtatctgcatctgcttttgaaatttgttggttggtttctaccgcagatcttgtatttcctaaatccattggactatcttcaaccgtagaaacaccttcagcctttgcttcttcaactgcttgtgttaccgtatcatgtggtacggtaacagcaatcgcaccgttagattgtccagttgatgccatactttcagtttgttcagatacagggtttggttgtgcttctggtaaatttgtggctggattctccgttcgttgaatggtggtgtcaactgaagttgtaacttcatcggcatgtgcaaccgttcctccccaagcaacaacagccgtcaccatggttccaagggcaacggaacatagagtgcgatattttttactcttgcgaaagacgtgtttctcgcctttttcctgattgacaagaaagtgatgattacatgttttggtcataaatagtccttcttttcttttttatgtagcaacaaactgtcactctttattagatacgagggcgttagcgagcacgacaaaaataggagttttgacgaagaactttccgttctatgagaaactctctttttttgtacagctcgtagcccaagttcaataccatcataaaaaagaaggcttgattttgttatcacaataaattgagggaaaagaaaatgttgcttttataccacaaatattgtaaaattgtagtgtaaaagcaacaagtggggggccgtatgtcaaaaaaagagattctactcgattttatagaaaagaacaatggcattgtcacaaacaaagattgtaaagcactaggtattccaacaatatatctgacaagactagagaaagaaggcattatcttccgagttgaaaaaggtattttcctaacccaaaacggagactatgatgaatactacttctttcaatatcgttttcctaaggctattttctcttatatttcggcactgtatctacaacagtttacagatgaaattccacaatattttgatgtgacagttcctagaggctaccgctttaatactcctccagctaatctaaacattcactttgtctctaaagaatacagcgagctgggaatgactactgtacctactcctatgggaaacaacgtaagggtatatgattttgaacgtattatttgtgattttgtaatacatcgagaaaagattgattccgaactctttgtcaagacacttcaatcttatgggaactatcctaaaaaaaatctagcaaaactctatgaatatgcgacaaaaatgaatactttagaaaaagttaaacaaactctggaggttctaatatgaacaaagctaaattaacagcactctgtcataaaatatcaaagaatactggtttaacctttaattccgtgatgacctattacttcctagaagtcattttgaaaaaattaagtcaaagttcttattcaaatcactatatcttcaaaggaggattcctactgtcgaatgtcatcggagttgaatctcgtagcactgttgatattgactttttattccatcaaataacactctcagaagaaactgttaaacagcaactcaaggaaattttagcagattccgaagaaggtatatcttttgtgattcaatcaatcacaactattaaagaaagtgatgactatggtggctatcgagcaacaatttcgtgccaacttgagaatattaaacaagttatccatttggatattgcgacaggtgatgttgtaactcctcagccgataacatacgactataaagctatttttgatgaagacaattttccaatcattgcttatacaattgaaacaattctagctgaaaaactccaaaccatctattcacgaaacttcttgaacagcagaagcaaagacttttacgatgtttatattctttcaaaattgaagaaaaaagatattgatttcaatcagttaaaaaatgcttgccaaagaactttttcctatcgcgaaactgagctcgatttcgaaaaaattattgaactactcgagagattcaaatctgatcctactcagaatcaacaatggcaaaattattcaaaaaaatatagttatacaaaaggaatttcacttgcaaatgtgcttgatgagatgattagtcttattacaattattatttctactgactctgattaaaacttttaactgccccactaggtaatcgtgacattaaaggaaaaggatatgctaactaatcaagttattgttagcatatccttttttatttcgtcgtataagcaaaactcaagctactatccactccagataatttacggaaggtatagtttggattgccattgtagttggtttctgagataaggaatgaaccgtctgggtagactttctccacaaaagccacatgtccgtattctgttggggtgccatgtcctcctcccgcaaaggaaaggatagctccttcttgtggacttgtccctgtctctccaccgagacttgcggctgttcgtacccaatcttggccattgcccatggtactgataattggaatcttctcaccgtttttacctttgagttttagacccagttgattgatacgggctgcgactccccaagtacattggccgtaagcgtaacccataccgtcaccacctcctggaatagagttttcaaaaaggtcttctcgtacagcttcaagtgcttttggatcgctttgtgctgtcccaccgttaggttgactaaagcctttttcaatttggtaataccactcactggctcgtgtttgacgttcaagtagcttatcaccactatttccttcccagtaaatgagaaagagctgggcaagactagctggactgcctgaatttttgaagaagtcctttaaccagttggtgtaataaggactatccccatacaacatgaaatccagttgtaagcctaagtcataccatttttgatgttttcctttggcatattccaacaataaagtatgtctgcgtgaaccatccgcggtatctgtccattggcctaagcctaaaccacgtttgagaatatttgggtaacgtccattgtatatagttggaccattaagtgtgagccagccctcatcatcccacgaactatctgtcgcaccaacaggtggagataaatagtcgccttcagctcgttttggattaatggaggattctaccgaccagttacctagaatggctgcgatagcttgattggtcgcacctttgcttttaagatagtcataaattgccttggctctctcgaactcatcgccgccaaactgaccgatagttggaagaatggtggtctgaacctgaatcacttttggaaagtagaatgctggattgacatagaccaacttatccgtgtcatcatcaaccttttgataggtgacttttagacccgttccgtctttggtctgaccaataatatctcctgccaagacttgttgattttcactcactcggcctgaatgaatgccaaacaaggttagtttagtcttattcactcccttaccagatgtcaaaacaacgttctctccatcaagagataccttgccatccatcggagctacaatgacttgaccttcttttgcttctaagatgatatgatgatgaagcgttggtttctcatcaatgacctcataaccatatcggtaggtcatgcttaaactatcctcatcggtctgtccctgaaagggattgtccaattcttgaagggctaaatagttgccttcttcggtcaattcgtttagttcttcttggtcctcatcagacagcttgtaagcaggttctttatataagtcagacatggatttaatagaatctccaccgtttaagtccgaccacagttgactgagaaattctttgtaggttgttccgcttgtctctatgaaatcatctaacttgtagtcttggtattgatgattcatgtaaaccatgacctcatcaatcttagtgtaaaaggtaattcccttatcgttggttcttgtatgttccgcatcttcccacgtcatgtgggtataactcttactcaattctatttcatcttgttgtatgacactactacctgaaacactcatgaaaaagctcatcatcaaaaggagtatcaagagaatgcctgagacaatccaagtcaaaggatttcccgcaaggacagaaaagaaagtcatacttcccttaatggcttggacgattcctttaaaacctgcgacactttgttttctgacatgatttaaaaaggtttggtagcgtcttcttggtttaagaggtttctggcgtgtgaatccttttccctttttgaagttctggaatcgttcctttccatgagaaaattttgttttggtaaaccgcacaccagtctgtccactttttactgccaccttacctgcttgataagtaaacctgccatagcgtctggctttcaaactagtatccttcatggttcttagaccatctaaatcatcctcctgtgctatcaggtcaagggattcagatgcagccaagcctaatccagctttgactttggtagagtttttcttagtcttttggactttcttgagttgtttaacctcacgcttggcagaacttacgtctttttctgcacttagccgatcaaatgatttttcttggtgaaactgaaagcgagacttcagggaaggattttctttttggaaagtaaacttgggattaactacctgctgtttctcacttagtttcacttctgacagatgttttcttgccgtccgcaaacgttcttgagcttgcggaagtcgatagttcttgatttcctttgccttcaacagtctaggagaaacataggtaatttcctttatgaacttctcttctgcttccttttggctactgagtagatttccttttaactctgttttcttttcctgaaacagagaatttttggctgattttcgaaatcttccttttttaggaacagtctgttttaaggtcctaacttctttccgataatgcatacgagctgattttaagttgcttcgaaagttttgcctagcctgtttgactagctttttatcctctttcatctcatgtcctcattttttcagggtccgtactcatgatgtcaaagagcttggtgtgttgcggaatcttattcttgaacggaacaacggtggaaccggccttaattaagcctgcccctttttcaggattgaccaagtacttctccagctctttagaaagcccaagcatatgcaccaattcttcgcgatcgctcttagcctgttttaaaagaatcatgaactcgctattggcaataatgcgtctgccattggcatccaaaagaagcgtttctacattctgagtaatacctgtcggtatcgccccatacttacggacacgactccaaagtttgaaaaagaaatcagaggcatacttgtccaataagagtagctgcatttcatcaaagtaaatccaggtcttcttccctagcttttggtttttgaccacccgattccaaatttggtcaaagataaccatgagggcaatttgttttaactcatcgcctagctttttgacattgtaaatcaggaaatgactgtctgttttaatattggtccgatgtgaaaatatgtccagcgacccttccacatagagttccatatccagtgccaagtccttagcttcctgttcaggttgttgagataagacaaagacccattcgaccaaggacggtgtgtcaaaatgcttatatgtcaagcgtgtcacacgatctatcaaggatttttcacgaccatccattttgcggtccaagagctttccaatccaagacaagagaaattcggatttgaccttaactgggtcctcatccatattctcatcagatagttctaagacatttaagaaggtggtagagtctggggcaatatcaatactctccccaccaaaggcttgaccgataatactgtactcattttctgggtcaacaataataatttcagtatcactatctgcttccttgagcttagttgagatgatttcgtgttttgtcgccatccctttgccagctccagaagtccctaaaatcaaacctgatggagtatttaacttgccacggtcaatactgatgatattacttgagatttgattgatgccataaaatttcccacccttgtcatgaatatctacggaagtccaaggtgcattcacggcaatatttgaagtcaatagagaccgagaaacaccttcgagatagttcttcccaaatggcaagagactattaaaggcagcttcttgcatataggtcaagttatcaataatcatatcattagaccctgccacttgcttgataatatcaagagattgtttgagttggtcttcagtatccgctagcacgccaattagaaatacggtgtcaaacagtttatctcctgtttgggtcatggtttgaagaagagcttcagcttcatcgatgttgttctcaagaacatggccgaccttctccaaatagattccagtccgagccattttttgttgttcaccaatcttttgtgattccatcaaggtcttcttggttcgtagcttggtcatggtttcagacttagtagagcctttggcatgtaggctaatcatcacttccaaatctgactgcatgaggtctcgaataaatttatcccctaactccatgccatagtcgcgaacataaacaatctgtaataatcgatcgtccaattcaatatgattcttgtgtttaaaggaaaggtaggttggggcaataaagtgtttggtggattgacctgagagagtcaaatccttataagaaaacggtaaatgattttcacctcgtaacatatccgcaaggacattcactcgctcctctccaccaagtaaaccaagagatacatcaatctctgaaaagccactcttgaaatattccccaatctgtgacagagaacgaaaagctagttttggtgtttggtcgctcttgccaaatgaaagaaacttgacagctgaaaagttgttctcacccgcctctaagttggcatccatcatgcgattcaattcatcacgataagtatcaaacccatcttcctgcaagggatagagaatactcttacgaaatttttccaaattaactttttgattgaaaatagtcagttggaaattggtcttatcatccagtgaattgattaaatcggaatatttctccacgatagctcccttatcatctaagccaactgtttggtaattaacatctcctaagagataggtttgtgagaaatagcttggactgacctgcataaggccattctgaaaaagtccttgataggctaacgtatttacggtagaagggctgatttcctgtttctgtgttttcgtcttttgctttttgtcattagaagaggtctttgatttcattgagtgttttaattttttcacgttggtctccttttcttccagtaaatgtgcggtctggcaccgttagttcataatgaaaacggtacttgaggtatatttcaaatggtaaatcgttggggcgatagaccccaaataacatgagtggaatggtaaagctaaaaacaaaaccatagacaaaccaatccccaaattgccaataaaataggttcaagcccaaaaccaaaatggttagggcgacagctggaaatacaaaaataacctgtctagttgtaaatcccagccatgccctgtgttgaacctttgagatgtccttaaagacacgtgtgttcataaatgttctccaatctaaataagctataaaaagaggaggcgagatagtgactcccttcctcctacatccccaaaatacttcgggcggttcgttgactgccaaccaaggcaatgattaacaatatggcctgtaccaagccaccaaacataatggcgagtgattccatcactccagctccatttgatacggcaatctttccagccgattcaaacaagggaacaagagatacaattagaaaaatcaaaataccttgaacggcatagaccatgatgtttttaaggtaaccaatcccaacacttctccagtcatcactaaggaaggtcggaatggtaacaggggcaaaaggaatcatcagatagagttggataaagcgaatggtaatcaagatattgacaaccataatactggccattcgtaccaaccaaatgagaatcgcaaaaaagccaataatcatttttcctacaattccagatcccttaatgcctgagatggtatcataattagcaccaccattcgtgacaagacttgccacttgttcaataacatatgaggcaatggcaataatggcttccacaataaccgtcgtattggtaatcacgaccgcgaccatgatgtagctgacaatcataggtgctatggcttcaaaggtcattgcaccgcctgagtttgcgattttcttggccatttttgaaaattcgagtacaagaactaccgcaagaatagctactcccaagggctgcataatacccttggtaatggctgtcatgtaagaccaaaccgtcggattaaagtccgccagtgacttaaccaagttagcagttgattctaaatcgacctgaaacccttcaaaaaggctatcgcttgacactttttcagaggctagaaatacaaaaggtgacgtaaaattcatcatcatgtcatgttctgacctcctctaaatggtaatctgtgtcacaaaagcacctgcggctcccaccatgacaccaccaacaatttctaaaatggcatttcggacgcctggcccaccatctttaatgttggttgaaaggttgataatgcccatgactacaagaaaggctcctactgcaatcaagcctttttgtaatagagacatggcctgggagaacatggagctggcgtccactccgtaaacaaagcctgttagtttttgattcatatttttcctcatttctattaatgtagtgacgtttctgtgcttaaatcccttatttgatagtctgacaagtccaattcttcctctttagccaagggattgatgtgatagttccaccaacggtcatcggtttccttatcagcgagcaacttccaatgtttatgtttgagaggaaaatatttcttggttcgaaaaacaggaacccctgcaatgcgtacgaggcactcatctcgtttcatagttccaacttcatcagccgtcatcaagtcacgagcaattttctgatgagaggtagaacttgaacccgtctgcccaaaagaacgactggtgcttctgacatcaacggtttgtttgcctaaaagtccactcatgaatttgaaagtttcctcgtcattcccacccaaatagaggagactgtcacagttccccagtatagttttccaagcttctttttccttataaagtccttggagttgagcgatattttggagaataggcacaagactcatattcctagagcggactgttgaggtttgttcagcgaagtctgggatttctccgacattcgcaaactcatccagatagcttctaacatgaataggcagttgccctttaaagtcaacatcagcctgtctggtcaaagtggagaaaaccgtagagaaaaataaagcagataggaaacgaaaggtcgtatcattgtctggaataacaagatagaccatggtcttttgagtgccccacgttttcaaatccatagtgtctctttgcgtcaaatcaatcaccgattgaatattaaagagggcaaatttagctgttgtgaccgcaatcaccgaatccaaggtcttatccttatagttttgaaaatctgcccagtttctcatggtaaagttctcatgaccatatttcttagcatagtcttcaaacaggacttcaagtatacttttgtcctgattgtctccctttgataagagtttgatgagtttcccaatctcagaaaaggctggataacggccacgcttacgtcttgcttcctgctcttgcttagaacttcctggaggattgtaaaaatccaccaagtaagaggcaatagctctcaccaatgtcatggaagcctcatcccaaaacggatcactgcgagaaccatttcctttggtattattaaaatagaccgttaacatacggttcaaatcattctctgtttctacataacgaaagggattaaaaccgtctgaattggtcatattaaccaagtctaaaaccttaacctgataaccgttttctaaaaagagtttacctgtcttctcagccaaatggtctttcggatctacgacaatattggaacagttaagttggataaggttgggtttcacaaagcgaaaggtcttacctgccccagaacccccaatgacaatcaaatttttatttcggtcaaactggggtttcttcttttccaacaaggttagacgaacatcacgagccaaaatcgtgtcattgaaaggattcttactgtaaaagttccgcttttccttactggttccaaatcgtgcagaaccatattcttccccttcccgatagactttctgtcctgtcgatacataaagatagactagcgtcatcattagaaccccaaggataaaggcaagaaaagatttttgagtaaaggaaaatagccataaaggattgaaaacctgatttaacccctctcctaagaggtaggcaatacgttccataggtggggcattagttaaactatcatagagtagggttagacgatggcagaaatagccaaaggcgagacccaagagtccaaagacaaatgctttttgcctggaatacattacaaggtcacctccttggtttttactgccgaaagttctgtcactctaattttctctttggccagttctatctcttggtccaaggttttatcaaaggttaaaccttctagcttctctggattagacatcagtttcttcaacaattcatccaagtgatgatcgagcaaggtcttatccttggcataaaagtagagatagtctttttgccaactaattgcgattggcagtttttctgactccatcaactccttaaatttctccacatcgattggcttatccagtatgtctttactaacatcaatcgcttcaatggcgtaaggactttgaaggagttcttccattttttgaaccccaatcttataagctgaatcttgagctaaggcttgcctagccgaccattctaagagttttaagagggttctgactgtcaataaactacttctttctacgtattgcatcgcttgacgttcttgttgttcagatgacatagtggcctcctcttttttcgattccctatcaaacataaggtgcttccataatacggaagcactcttgattttggtatcacaagaaagttacgacataagccaaactattccaaagtaaatgtaaggcgattgccgtcatacaatcagttttcaatcgaacaacagccaaggtcaagccaagacagctatagatgagccaactccctaactgattaggtccatgggatagaacaaagagaaaactggtcacgcctatttgttcaaaagggaatgtcaatttttcccacagcaattgcctgtaaacaatctcttcaagaatacttgcattgaccagaaacaataaaaagataataggaggaacctgttttcctacttgtaccaatactgcttgattcctagtctgaactggaaataggaaactgatgaagactgcaaaagcaaccatagccacaaagccaagaagcaaccaacttaggcgattttgtacgcccacaatttttaatggaacagttttatgacgggcaatctctaagcaagtcacacttaataggaccaattgtagcaagactataccctctattgtcagatactctttcaggaataaactcaccagaagaccgttaagctgtatggctagataaaacaacactatccttatcattgtcacctcttaaataaatcttcataatcaatatctaagactagaacaatacgctcaacccatcttatttgtggcatcagacgattagatttgtaatgccgtaatttttgatagaggcgattaaattcacttggataaacatattgaccgttgaatactttgcgagctagttctgcccaagtgaggtctttttcagccagaatgatttctaaattgtcccaaaatcgttcattcatcttcacacctaccctgtcacttgtttcatcagactggcctgaaacaactcttcttttacctgtctgggaagaaaagtacgtacttcgtctagcccaatagctggatagacgtgattctgacagacaatgagaggcagacgaaggttttggtctggcttttggagaatgagctgaatcatctcattcaaacttatcgaatattgacttttaaagcgaagaaatcgtggcgacagcaactcaaaacaatccgtggttttggcaaagagtgacagtatgatttcacggtttacctcacatgcttttgtacaacgataagccactccataggtcgtcaaaatggttagtaaatcttgatttgtattggtattatttcctagatatacctcaagcataggcacctccttatagggttaggctattttcaactgttggttcaggagttgagaaatagcgactcatatcaatgggcatccgtccttcaccaaagcacttgaccgtcactagagtcgttaaaatgccctcctttcccctagcagaataattttcaccaaaggcacgaaaggccaggtgattgtctttcgtcaatagtgtatctacaccatttttaatatccctagtttccataaaatccgaaatctgatgaagattggattcgtagaataggggatcattcatctctttgtggtaatcatcttcaaaagttacctcaaagtcacaatcaaaattggggagcgacagtatcttttgtaatagctgattggtttcagcttggtgaatacgttcttctaattcagtacaatctaggatacttttcttatgtagtaagttcatgtttttcttcctcttccgttcttctaaattctctggcaatggcttcaataactgtgacagtcacgctattgccggcctgtttgtatagttggctcttactagaaacactctctgctctttcataagcccaatcaggaaagccttgaagtctgaagcactctcttggtgtcagtcgtcttattctcaggcgataaagtttcccctctaagacaatgcctgtgacttcataccacttatcctgtcgatattccagagcagcaactactactcccatattgtctgaagtcgtcagagtattggatattccctttcccacacgtcccctacgtttggttgagtctggataagccagattgacagagtctccaagagttgcctttgcgtaccctgttttagtggcttccttgattttcagaaatggcagctcctccctcagcaaaatctttggcaccttgtctccaccttgcatggtggtcaaggtcggtgacaagccagaaatgtcaaatactctaccggtctggtcaaagctagtcggcagatttcctgcgacaacaactccgtgtttgtcttgactggtcaaagtaaacatagggtcttgattgtccttaaatcgacgaccatgttggcgtttttctagtctatctggtgttaagactggaatggcgatttttgcaccctctcctttacctcttgttagtgtaggagcaagtccactcgtcagatagacttcaccattcaaaccatgtttagagggattgatatttcctagcctttcaagatgagctgggctgtcttctcttctgagaggaaatatgaatctggaacggtatcttctagaatgtccgataataaagacccgttctctgttttgcgggacttggaagtccttgctgttaagcacctgccattcgacatcataccccaattcatccagcgtggagaggattgtggcgaacgtccgtccctcgtcgtgattgagtaggcctttgacgttttccaaaaatagaaaacgtggttggatttgtttggccgctcgagcaatctcaaaaaagagagtccctcgagtatcttcaaatcccaatcgtctgcctgcgagtgaaaatgcttggcaaggaaatcccccgcagatgatgtccacttgccctctaaattgtctaaagtcatggtctgtgacctctttaatgtcatggtattctatttccccttctgtgttaaacatggctttataagatgttctagcgaatttatcaatttcacaaaagcccaggcatttatgaccctgtgattccatccctagcctaaaaccgcctatcccagcaaataaatctaaaaatttcatttttcctctctttccaactaaaaaagagccttacacttgtaaaactcttgcttatatatgatcatccatttctggtgcacggatgatttcaacaatcaaaatgatgatagaaatcagatagattccacctagtatccaccaaatcatcttattcacctccttttacttcttgtcgtctcagttgcttggtccactccgacagcacaccattaaatacgtattcagctattacttcggctgaccgagcaaatcgcatttgttccaatgcatactgataccggtcactaaaataaatcatggcatagtcactagcagactgagatagacctgtctgtcttaactggtcatgaaccaaaccccaaatatagtctcgatcgtacttggtcacgccatcgacttttgaagtaaagttttcttcttttttctcatctactagctgcctctcctcctcgtccttcataactaagtcactcccttcagtttcactatatttagtctcacttccttcagtctcactaggggctgaatataagaccggccccgtctttctttgagactcccctagtgtttttttaacactagccccgtctgtatgtaagactggggtaggttcatgttctaattcccccaagtaaattttatttgccattcgacctctttcactagaggactgttggacttcatcaattaagccatattcacgtaaggttttcttgatagagagtagttttgactttgaacagcctaatagtgccatcagatttgaattggaataaatcaaataaatagccccatcctcatcaatccagcctttactcaaagacaactccaaccgatcttttaaaaccgcgtaggctaccttaacttccagcttcatatccttataacgttcactctcaaacaaaattttagggagtttataataacgctctgatgtctgatattgattagcggtaatacgtttcatgattgtccctccaagactaaaagtccaaaattcccgaattcatcaaatcggattaaacctgtttgttccatttcatttaccagttgagttgcttttagattatcaactcccatgatggtcatgatatggctcttcacgatatgacgtgatgactgttcttccttttgcataattacctccaaaacgcaaaaatggggtagacaatctagtgtctacccccgaaagtttattaaaacaaaaatcctgccaaagaatttttggcaggatttttggcaggaaaccaaatcaatttatcagtttctatcaatcgcttatcgctctcaaagactggtaaatagggattccgcaatctaattatgatatgactcttatttaagagtaactgaagcacctgcagcttcaagtttttctttgatttcgttagcttctgcttctgaagcaccttctttgataactgatggtgcgttatcaacgatagctttagcttctttaagaccttcgcctgtgatttcacgaacaactttgataacgccaacttttttgtctccagcagctgttaattcaacgtcaaatgagtctttagcagcagcagcttcaccaccagcagcggcagcagctacaggagcagcagcagttacaccaaattcttcttcgatagcttttacaagatcgttaagttcaagaattgtagcttctttaatttcagcaataatattttcaatgtttaatgccattgttatttcctccaaaaatatgttttaatataaaattatgtagctaggctacttgaagagtgcttatgccacttcttcgtctttttctgcaactgctttgacagcatatgcaacgttgcgtactggcgcttgaagtactgaaaggagcattgaaagcataccttctttgtttggtaatttagcaagagcgttaatttcttcaactgaagtgaatttaccgtctactgaaccacctttgatttcaagagcttctgcatctttagcgaaatcgctaataactttagctggtgcaataacatcttcgttagaaaacgcaactgctgatggaccaacaaaaagttctttaaggtcttcaagacctgctttttcagctgcacgagttaaaattgagtttttgataactttaaactcaacatcgctttcacgaagtgaacgacgtaagttagtatcttgctcaacagtaagaccacgtgaatcaacaacaacgatacttgctgctgctttcattttctcagcaataagttcaacttgttcagctttttttgcaataattgcttcactcattagttttacctccgtttttattttttgggataagcacaaaaaaatcgcacctaaacctagacacgaaagtacaatacgttattttataatgacgttttgtgcctcggtaggaatattatgagcactgctcccctactgtcttaggtcagtttcatcagaaactttaaatagtataacttataattctagcattgtcaataatttttattatttttctgaaataattttatagtaccaaaaaatactaaaatagttatctttatatcaaaaaaataatattttagtatttatttattgacctttactgactaaaggtgtattatagtaccagaaagataattaaatatttaaattagacctctctatatgtattaaagtataggaatcaataattaactttcaaaaattaaaatcaattgaggtatttaatatatggcaaataataatttttataatcgtgacccttttggaaatatggatgatatttttaattctctaatgggaaatatggggggctataacagtgagaataagcgatacctaatcaatggacgggaagttactcctgaagaattcagtcaatatcgtcaaactggaaaactccccggtcaagagctaaataaccaaaacactcctacaaaccaagtctctgcagatagtgttttgactaaattaggaactaatttaaccgatcaagcacgtcagcatttgctagatccagttattggacgaaacaaagaaattcaggaaactgcagaaattctagctcgtcgtactaaaaataatcctgttctggttggtgatgcaggtgttggtaaaacagctgttattgaaggtttggcacaagcaattataaatggtgatgtccctgctgctatcaaaaataaagaaatcatttcgatagatatttctagccttgaagctggcacccaatataggggtagttttgaagaaaatattcaaaatatcataaaagaagttaaggaaacaggaaatattattctcttctttgatgaaatacaccaaatattaggagccggttcaactggtggtgatagtggctctaaggggctcgcagatatacttaagcctgcactttcacgtggtgagttaacggttataggtgcaactactcaagatgaatatcgtaacaccattctcaagaatgctgccttagcacgtcgctttaacgaagttaaagtcaatgcaccttctgcacaagatactttcaatatccttatggggataagaaacctctatgagcaacatcataatgttgttttacctgactctgttttgaaagcagctgtagatttatctattcaatacatcccacaaagaagtctccctgataaagcaattgaccttattgatatgactgctgcacacctagctgcgcaacatcccgtaactgaccttaaatccttagaaaaagaaatcgctgagcaaagagacaagcaagaaaaagctgtcaatactgaagattttgaagaagctcttaaggtcaagacacgcattgaagagttacaaaaccagattgataatcataccgaaggacaaaaagtcactgcaactatcaacgatatcgctatgtcaattgagcgtctaactggagttcctgtatcaaatatgggtgctagtgatattgaacgcttaaaagaacttggcaatcgtctaaaaggtaaagtcattggtcaaaatgatgctgttgaggcagttgcgagagctattcgccgaaatcgtgctggtttcgatgatggtaatcgtccgattggtagctttctatttgttggaccaactggagttggtaaaaccgagctagcaaagcaattagcttttgatatgttcggatcaaaggatgctatcgttagacttgatatgtctgaatataatgatcgtacagcagtttctaagctaattggagcgactgctggttacgttggttatgacgacaatagtaatacactaacagaacgtatccgtcgaaatccttattctattgttcttcttgatgaaatcgaaaaagctgacccgcaagttatcacgcttctccttcaagttctagatgatggccgtttaactgatggtcaaggaaacactattaactttaaaaatactgttatcattgcaacctcaaatgcaggttttggaaacgaagcatttacaggtgacagcgataaagacttgaaaattatggaacgaatttctccatatttccgtccagaatttctaaatcgtttcaatggtgttattgaattctctcacctaagcaaagatgacttaagcgaaattgtagatttgatgcttgatgaagttaaccaaacaattggcaaaaaaggaattgaccttgtggtagatgaaaatgttaaatcacacttaattgaactgggttatgacgaagcaatgggagtacgtccattgcgccgtgtcatcgagcaagaaattcgagatcgcatcacagactactatctcgatcatacagacgttaaacacctaaaagctaatttgcaagatggccaaatcgtcatttctgaaagataaaaacaaaacccgtttggaagaatccaagcgggttttctagtggattgaaaaaggaaatcaaacttaccctaaccttcttcaagatactttacttattttaaatgtgcagagaggtcagcaatatcagctggtctagttcggcaacaacctccgacaacttgggcgccaagtttttgccagtcacttgtattttcaagtagggtgtgtgaatgatcagggctagattgccaagattggcttgccccatcataaacctctccagagtttggataggtcacaagaggcttgttagtctgctctgctattgcttgcaagaaatcagcaactaacgatggacttgaacagttaatgcccagcgccacgacctgtgggctaacatcaatagctttcgccaagtctgcaacagcactaccatctgagatggtcttaccatcttgagaggtgaatgacatataagcctcaacctgagggaaatcctcggcaagtagctcaataagagcctcagcctcctgagcgtttggaatggtttcaagtgccagaatgtcaacaccctcatctaaaagaagctcaatacgatggcgatggaagtttttaagaccttgcttatcaatatcgtagagtccagtgtactcagagccatccgctaaaaaggcagcgtagggaccaacatccccagaaatcaaaggatagattctctctgatttttcttcttttgtcaaacttttccaaacttgctcacgcgcagcttttgccaactgaacagtcaagcgaatcaaatcttctgtctgactttcagagacaccaacttgagctagtccttgtaaagtcgcctgataagttgatgtcgtcacaatatcagcgccagcacgaatataatcttcatgaatggtctgaatagctgctggatcctcaatcagatatttggctgaccaaagtttcccagaaacatcacaacctctactctcaagctcggtccccaaggcaccatgtaggatgagagtttttttactctctaaaagttctttaaatcttcccataagatcaccatttcttgtaacgtagtttgtgataaatatagcagaaaataataaatggaacaccgaagtaaagcccagcacgttgtgagctatcccaagcaatccctacaatcgaaatcaagagcaaaatgattgtgatataagggagaactggtgtaaaaggtgttttgtaagacaaatcttctagttgattctctttcaagaattccttgcggaaattgatttgtgcgactggaatggctagccatacgacaacaacagcaaagcccgcgattgaaaccaaggctagataaactgtgtctgcagcgtaaatacttgaaaagagcgacagcactgctcctgccattgacaagagaagagcacgcattgggacaccgtgtttattgattttcacaacagattttgacaacataccttcattggcaagggaccagagcatacggcttgatgcgtagagacctgagttaccagcagacaggatggctgtcaagataacgaagttcatgatatccgccgtaaaagggattcccatcttgtcaaagacatcaacgaatggtgctgtggatacgcctgcctctttcattggcaatagcgaagctaggacaacaattgtcagtacaaagaaaacaaccaagcgaccgattgtcgttttaatagcccttggtacagcttctttgggattatccgtttcaccagccgcaataccaattaactcagtaccagagaaggcatagttaacagccaacatgactgagacaactgcaacgataccatttggaaaggcaccattggcagtcagatgagtgaagagaatagccttgtgctgaccttcaaaggaaactagaccaaacatagcacctaagcccaagataataaagataatgatagcaataaccttaatacttgagaagaaagactctgcttctgcaaaaaagcgtacgctaagagcatttaaaccaaaaatcacaagggcaaaaaaggaagcaaatgcccaagccggcacatttgggaaccagcgctgcatcagcatggcagcacctaaaaattcagtccccaaggcgaccgtccaacaaatccaatatagccaagcaacagtaaaacctgttccaggactgataaacttagtggcataagtgtggaatgaccccgtcaccggcatggcaaccgccaattccccaagtgatagcatgaccaaataaaccacaacggcaccaatcaaataagacagcacagctccaagcggaccagcctgtgcaatggtataacctgaactcaagaaaagcccagtcccgataacaccacctagcgataacataaagagatgacgactggtcatcttacgctggaatttaccttcatcttcataacgatgattttccataacaacctccaagaaactaatacttttatcctaccacaatctagtcgtattggggaataggtattagctatcatatatgataaagaaaaactattacaaaaaatcagcgaatcataaatagcggtaaccttatttttttatccttacaaaattaacgaccttatgaaaacggtccatttgccaaggactaataatataattggtctccttatccttcaatagctgtacaggtgcaataatgctagttagtacacagacaatcaacatgataaaaccacctagccaatctccccaagtgagcattccttctgcactagcttgatagatgtatacgcaagctattggtactaggagaaatactgtcgttgctagaccaggattataccaagttttaagtttaatattcatctgaaaaccatgacccaagagctgcgttagactaaagaacatgactcctaatccaagccaataagcttgaggaaaagcaatactagcaatgtaaagcaaccaagcaatagtattaaccaacataatagactgagtattgcctggaaaacaatccatcagctcttcttcatcataaacaacatagttaatgataggtgatgccccaccgggaaactgatattcttcaaattgatgcgctagaagtgccataaagtaaaaatacaatagatagtgaagcattgaccagtcaggtctaaaaacaagcaatattactgctaaaataataaataaaattgctccaaaacgataccagtaatttctaaaatatgacatgataatacctcctatttaaactgtgtttcacgaaaatgtgttaaaaatggttttgagcgtgaaagatcaacatcactaaatgcgtaatttgaatgtcgacctaaacgcttatagattggggaacgaaaggctataaagtagttaagaacaatccatatcagcctaaaaaccaatcaagtccagaatacaacttccaatcatgagctaaataatagacagaaacagggacaagacctactaaggtcgtaagaagtcctggattataccacttcttcaaggaaagattaaaaaagaaaagatgcatggcaagttctgcaaatgcaaaaatcatgactgcaagtgttaaaaatggtatattgggacaaaaaatcggcaaaagataaacaatcactgcaaaccactgattcccgaaaaaggctgatagatggtttaagtcccacttactagtatcagtttcaaccgatttaagttcaactagcatagtgataagcggaaaacctccagggaaaccaaattcttcgaaaaagtgtaattgaataaaaagtcccgaaataagtagtgactgcactcgtaaatcccaatttccaaaaaataatgctaaggcaaaaagagaagcaagatagggacaaaagaggtaccattttgttatcaatgctttcataagatgacctccaagatttgtgacatttgataccatatagtataatcaagtgaacctataatatcaatacctttggaggttttatgcacaaatgactgaaagtgtgacagttaataaaaagagaataaaacaaatcactcaaacacaagaggatatcttaacagcttttggccaacttttggaagagtatccctatgagaaaattcagattagccaaattgccaagaaatctggctatgctagaaggaccttttaccgacactttgacagtcgagatgacctacttacccttttcatcgaaagactaacattaaatctctttaagcaacttggtcaattggagcaacctacttttagccaagttttccaaaatttttttagttattggtctgattataaatcccttcttctcattcttagaaagaatgacctactccctcaatttcaacaatcctggttccgacatattgatttgatagagttaggtcgtggtgatttatcttccaatacctatgctcagcgatttgcgattggtggtattttcagtgttctaattgagtggattcatcaggactgccaaacaagtatcgaagaattaactcaactttccttcgatattatcaatcatttaaaaaattaaaaagagctttgcagtagtctcaacagctactgcaaagctctttttgtcataaactctcaaattataactcagataaaatagtatcccatgattcatcaagacctgtgcggtcaacagatgaaaagacgatgaaatggtcctttttatcaaagtttaatttcttcttaatagacgactcatgtttattccacttgccacgaggtattttatctgcctttgtcgctacaataattactggaatctcatagtacttaagaaattcatacatttgaatatcgtccgcacttggatcatgacgaaaatcaactaaactaacaacaacacgaaggttatcacgtgttacaaggtactcttcaatcatcttgccccacttagcacgctcagttttagacaccttagcgtagccatatccagggacatcgacaaaacgcagtttgtcatcaatgttataaaagttgagcagttgtgtcttacctggcttactcgacgtacgcgctaggtttttacgaccaagaagcgtgttgataaagcttgatttaccaacatttgaacgaccagcgagagcaacttctgggagatcatcctgaggataatgtgacttgttagctgcactcaataaaatagacgcattatgagtatttaaaaattcttctgccatctctatctccctaagccgtctctaaaacaggcttgtcagtaccctcaacagcagcctttgtgatacgaacttttgttacatcttcttggcttggaatttcaaacatgatatcaagcatcgtttcttcaataatagaacgtaaaccacgtgcaccagtcttgcgctcgatagccttatcagcgatagccaatagagcatcctggtcaaattccaattctacaccatcataagataataaggtttggtattgtttaaccaaagcattgcgtggttctgtcagaatacgaaccagatcttctgcagtaagaagttctaacgctgcaactactggtaaacggccaataaactctggaatcagtccaaacttttgaatatcctcagaaattatctcttgcatataagaagcgttgtcatcaattttacggcttgtctgtccaaaaccaataactttttcgcctaaacgttgcttcacaaggtcttcaataccatcaaaagcaccaccgacaataaaaaggatgttcttggtattaatttgaatcatttcttggttaggatgtttacgcccaccctgtgggggaacacttgctaccgtaccctcaataattttaagaagggcttgctgtacaccttcaccagacacatcacgtgtgatagaaacattttcgcctttcttagcaattttatctatttcatcaacgtagataataccacgctcagcacgttcgacattataatcagcagcttgaatcaatttaagaagaatattctcaacatcttctccaacgtatcctgcttcggtcaatgaagtcgcatctgcaatagcaaacggtacattaaggcttttagccagtgtttgtgctaagaaggtttttcctgagccagttggaccaatcatcaaaatgttggatttttgcaaatctacatcatcgtcactactctcggtataactaacacgcttgtaatgattgtagacagcaactgctaaagcacgtttagcacgatcttgccctacaacatattgatttaatatttctaatagttccttaggttttggtacttctgctaaatcagccagtacttcctcagctaattcttccttaataatttcttgtgataaggccacacattcattacaaatgaaaacaccattacctgcaataattttttttacttcatcttggcttttgccacaaaatgaacaatagacattcatatcgttattacgattcccagccattttttcctcaacttttctattcatttaatttaaaataatgttccataaaaggcatggattgtgttgacaaggttagtgaaagcattcatcaaaaaaactgttcctaatccatatctttttttctttatagcaggaattgcacataaaacacaaatcacagctaaaaatgcggtaaagaccccaaaaaggctacgttgcattgaatagtattccttccttatttttcaaaatatgtcacagtaaaagcatgagcattctgctcatccttttcaaaataatctctagagataactttaaactcagatagattaacatcaggaaaataggtatcacctttaaattttccatgaactttagtttttatgattgcttcacaataaggcagaaatgctttataaatacttgcaccacctacaataaataaggtcttattatgttcctgaaaccattttataacttgttcaacactatttaggactgtcactccatctgcttggaattgttcatcttttgttaagatgattgtctctctaccaggtaaaacacgacggttcattccatcaaaggtctttcgtcccataagcaaagcctgccccatggtcgtttctttgaagtgatgtaactctttaggaagcctccatggtaaaccgccattaactccaatcaaatggtcttcatcttcagcccaaatggcaattatttgctttgtcatgacttttttcctcactaacttatctctagatattctaacaaattttacctcaaattgcttgttaaaaaacatgagatagttagattgctaaatcaaaacgtaattgaggtttaattgggtcataatcaactaacgcaaaatcatctggtttaatatcaaaaaagtctgttccatctggaacattcaatactagtttggggttacactcagacggttggcgttttaagagttcctgagcttgttcaaactggttatcataaatatgaagattattgataaaatagaaaaacttcccaactctccaaccaaaatgctttgcaatcatcatctgaagtgctacatactgcatagcattaatatgatgtgcaactaacatgtcattagaacgttgtgttaatgtggcatccaaataaagctcaccattaacgcgtctcacatcaaacatcgtttgaaaagcacaaggtagtaggccttctgtttcttcaaatgcttcatagtcccataatgaaataacattacgacgattccaagggttatcttcaagctgttttaagagttttgatataatattatgttttttaacaactgcaccgtagcgctgacctatcgtgccagtatggccaacttcccaatcattccagtatgtcacaccatatttatcattcaaaactgctaaatcatttgtctgatcttgataaatccagaaaatttctttaatagcagattttattggaattggacgtagagttgtaataggaaattcaccctttgataaatcatactctgcaaaggcacctgtaatatacttagaattagccatttccccatttttatatctaggtctggcttgctcgctaaatacaccttcagacataattttcgtgatattgtctttaaataataaatcggcttttgtcatgagatacctccaaagtcttattttatcagattttaaaaagatattctagtgagaaacaagactttgaaggttaaagctttttttcatatttttagcttctttatggtaaaatggaatttagcaaaaatgacttttattcagaaaggtttaccaatgaaaataggaattgataagattggttttgcaaccagtcaatatgtccttgaaatgactgatttggctattgctcgccaagttgaccctgaaaaattcagcaagggattattgttagattcacttagtattacgccagttacagaagatatcgttacacttgcagcttctgcagctaatgatattttatctgatgaggacaaagaaactattgatatggtgattgtcgctacagaatcaagtatcgatcagagtaaggcggcttctgtctatgtacatcaacttttagagattcaacctttcgcaaggtcattcgagatgaaagaagcatgctatagcgcaactgctgctcttgattacgctaaattacatgtagaaaaacatccagattctaaagtattagtgatagcttcagatattgctaaatatggcattaaatctactggagaatccactcaaggtgcaggcagtatcgctatgcttattagtcaaaatccatccattctagagctaaaagaggaccatctagcgcaaacccgtgatattatggacttttggcgaccaaattattctgatgttccttatgttaatggcatgttttcaacaaaacaatatctagatatgctaaaaactacttggaaagtatatcaaaaacgttttaatactagtctaagtgactatgctgctttttgtttccatattccttttccaaaattagctttaaagggctttaataaaattctagataataacttagatgaacaaaagaaagctgaactacaagaaaattttgagcactctattacctatagtaagaaaattggaaattgctatactggctcattgtatctaggacttctatcgttactagaaaatagtcaaaatttaaaagcaggtgatcaaattgccttcttttcatacggtagcggagctgttgctgaaatttttaccggtcagttagtagacggctaccaaaataaacttcagagcgatcgtatggatcaactcaataaacgtcaaaaaattacagtaactgagtatgagaaactcttctttgaaaaaacaatcctagacgaaaatggaaatgctaacttcaacacctaccggactggcactttttctctagactctatttgcgaacatcaacgtatctacaagaaaattaataattaatatgacaaaaatttcctggacaggattttcaaaaaaatcccctgaagaacgtattcattaccttgaagaacaagattttttagctgattcttccctagaaatagtgacgaatcaggacttactctctttatcactagccaatcaaatggctgaaaatgtcatcggtcgaatagccttaccattttcacttgtcccagatgttttggttaacggtaaagtctatcaagtcccatatgtcactgaagaaccgtcagttgttgctgctgcaagttttgctgctaaaattataaaacgatctggtggttttctgacaaccgtccataatcgtaaaatgattggacaagtagccctttatgatgtacaagatagtcaacacactaaagaatctatattaaatcaaaaacagcaattattagaaatagccaacgctgctcatccatcaatagtcaagcgtggaggcggtgcttgcgacctaactattgagattaaagaagactttttgattgtttaccttatggttgatacaaaagaagccatgggtgctaatatggttaacaccatgatggaagcattatcttcgccattagaagacatttcaaaaggcaaaagcttaatgtcaattttatctaactatgctaccgaatctttagtgactgctacatgccgagttgatttaagatttctaagtcgccaaaaagaggaggccatcaagttagctcaaaaaatgacgatggcaagtcaattagctcaagtagacccttatcgtgctagcacacataataaaggtatttttaatggcattgatgctatcgtcttagctactggaaatgattggcgagctattgaagctggagcgcatacctatgctgtcaaagatgggcaatatcgaggattatctagatggtcttataaggttgatgataattgcctagaaggtactctgacgctaccgatgcctgttgcaacaaaaggtggatccattggtattaaccctagtgtccacctagctcacgatctactaggtcgtcctaatgctaaagagttggcaagtattattctttcgattggactagctcaaaattttgcggctcttaaggcattggttagcacaggaattcaagctggtcacatgaaacttcaagcaaagtcgttggcactacttgctggagctaaagaagaacaaatttcagaagtcgttaaacagcttctagactctaaacacatgaatctagagacagcacaaaaaattgtcaataaacttactaaaagtaaaaaaagaatttgagaaaaatcatctcaaattctttttttacttgacttgaatttccataagtgtataatctagttataaagactagattatatggagttttaaaatgaataaaaatcaatacccaaaatgggaagaattacctgaactagatttgtatcttgaccaagtacttctctatgtgaatcaattaattaatcctaaaacaataactaacgataaactactcaccgcttcgatgatcaacaattatgtcaaacataattatatatccaaacctataaaaaaaaaatacaatcgccgtcaagtagcacgattgattgttattacagcttttaaacaagtttttgctattcaagaaatcagtcaaacattagaacttctgacagctgacaatcattctgaagaagcatataacggatttgctgcttgtatgaacaaagaagaggttcacgatttaccaccagttgtcattagtgcctgtcagacgttgaacctttatcaagaaacacaaaaattagttttagaactaggaggaaaaaataaaaatgcttaaagaaatgtctatcaaattaagtcctcaactttcctttggcgaagagcttgcaaatagtatcactcacgctgtaggagctttgcttatgctaatcctattaccaatcaccgctgtctatagtcacaaccacttcggattacaagcagcacttggtacctcaatattcgtcacttctttatttttgatgtttttatcatcaagtatttaccactccatgacttataacagtcttcaaaaatatgttctacgcatgattgatcactctatgatttatattgctattgcaggtagttatactcctgtcgcattgtcacttattggcggctggttaggatatctcatcatttttttacaatgggggattacattatttggtatcctttataaaatcttcgctcccaaaatcaatgataaatttagccttgtactttacctcattatgggatggctggttatctttattttccctgctattatcacaaaaactggaccagctttttggggattactcttggctggtggtatttgctatactatcggtgcactcttttatgctcgcaaacgtccttatgatcacatgatttggcacctttttattctattagcttctattttacaatacattggaattgtctacttcatgctataaaatttaactacattttattgattatttttttgctaaaccatgatataataataatcatctaaatcttagagagaaggcgtggacatatgaaaagtgcttatatcttttttaatccaaaatctggtaaagatgaacaagcattggcaaaagaagtaaaatcttatttaatagaacatgattttcaagacgattatgttcgtattattacaccttcatctgttgaggaagctgtcgccttagcaaaaaaagcatctgaagaccatatcgacttggttattcctttagggggagatggcactattaataaaatctgtggtggtgtctacgctggtggtgcttatcctactatcggactagtacctgccgggaccgtcaataacttttcaaaagctttgaacatcccgcaagagaggaatctcgctcttgaaaaccttctaaacggtcatgtaaagtccgtagatatctgtaaagttaatgacgattacatgattagcagtttaacacttggtctccttgctgatattgctgctaatgtcacttctgaaatgaagcgtaaattaggcccttttgctttcttaggtgatgcctaccgtatattaaagcgtaatcgatcatattctatcactcttgcttacgataataatgtacggtctttacgcacgcggttactccttattaccatgaccaattcgattgccggtatgccagccttctctccagaagcaacaattgatgatggactttttagagtctacactatggaacatattcacttcttcaaattattgttgcatctaagacaatttcgtaagggagattttagtcaagcaaaggagataaaacattttcataccaataatctgactatttcaacttttaaacgtaaaaaatcagctatccctaaagttcgtattgatggcgatccaggtgaccaattacctgtaaaagttgaagtcatccctaaagccttaaagtttatcattcctaactcattaccataatataaaaggacctagacataagtattagagtaaatactatctgtctaggttcttttttgttatacttaaagcaataaatatcattgaaaggaagtatacgatgacaacatttactgctaaatttattgaccaagagtgggaagtcccagtagaatcaggtcgctaccatatgattgttggggaattttgtccttatgcacaacgtccgcagattgcgcgccaactgcttggtttggataaacatatttctatcagttttgtggatgatgttccaagtgatataggacttatttttagccaaccagaacaggttactggtgctaagtcgcttcgtgatatttatcatttgactgacccgacctaccaaggtccttatactatcccaattttaattgacaagaccgataatcgtattgtctgtaaggaatctgcagatttgcttcgactttttactacagatttctctgatttgcatcaagaggatgctcctgtccttttcagccaagaaactgcttcacttattgataatgacattaaagacattaataagaacttccaaagcttaatgtataagttagcttttcttgataaacaagcagattatgatacttatagtaaggaattcttcacttttctagatcaaaaagaacacttactaggacaacgtcctttcttgctcggagataatctaagtgaggttgatattcatttctttacaccattagtccgatgggatattgctgggcgtgatcttctactacttaatcagaaagcgctagaagactacccaaatattttttcttgggctaaaactttatacaatgactttaatttaaaaacattaaccaatccacaatccataaaaaataactattacttaggcaaatttggaagagctgttcgtcatcataccatcgtcccaacaggtccaaatatggcaaaatgggaaaaataaagctaaaaagctaaggcaattcacagccttagctttttagctatactagtccaaagtggaccaatcaaattcaataaaagtcttgaagagatctccataagtaccactgtaagcaatatctttatctttataagtcattttcgtaataggataattgtcaggaacagtaacacatcccattaaaactcgaataaaatcatttggattttcaaaaacttggcatcgttcagtgtcgtaagcatctttataatacagtttaatcatcttattacctctgacgttttacaaggaaactttgacaggaagctatatctacttcacaaaaataatatcatttagcattggcttccttcaattgaccatacaatatataattgacttgtcgtaaatcagttatttttttacaattcagtgcacacattatcattcttaaatcttctttccaagaattgagaattgcaataacatcatctacaggataacgctcaactaattctaaaactgttctagaaagtccaacagctttagcacccaacactaaacattttaccatatctaaaggatgacgaatgccaccagatgctaggatatccattttgtccatcatagattgagcgtttattaaggattgagctgttgtttgcccccaggtattgagatacgaacggtcgcgtccacgttgattttcgatgtaagcaaaactagtccccccacgccccgaaatatctacagttgtgatacctatatcgtaagcatcctttattgattgtaaatccatcccaaaaccaacctcttttaaaataagtgggcattggatattgtcgacgtattcttttaagtgagaacgccacatgtgaaattcacgctctccttcaggcatcaaaagttcttgcatcacattaacatgaacttgtaaaaaaatggggttcatagccttaacggttgactctgctgctggtacaggcttgtctaaccctatatttgtcgccagttttaaatcaggatacaagtctgttgttgggtaggaatcatcttcatcgtttttgagagctgccgaatatgaacctgtcaccataacaatccctgtagcttgagcaacctgtgccaatttatgattgactgctttccctttttcactaccgcctgtcatagcattgatataaaaaggaaattcaaagctttgaccagcaaaatgtgttgataaatcgatatcgttgacattatattttggtaaggatgaatgtattaactcaatatcgtcaaaactattataatgcgactgatatttaagagcatattttatgtgatcatcttttcgatttgtcatgacagtgtctccttactaagtagttcaataccagcactctcccaacgcttgattagagtttgattatcatttttattaaaggatatggctataccacaatcgcctcctccagatcctgaagattttgtgactatatctaggcctttgcttgcctctttaagcttttgaagtttatcggtgtaaatagatggatgaagattaaataatagcaagctaatttcttctaaacatctcttaatcgcttctttatctccttctttaaaggctgaaagtaactggacaacttgatactttgtatcatctaaaaaacgctgcgtaatagttgatttaactatatttatcatttcttttgaaatggacggttgcattgtccatcccactaaaaaatccatctccaataaagcttgtattttggtaatacgataaccccattcagcttccaatacttgttccaaaggttttgtttcaatcatttttgaaacagccctacgatcaaaagctgaataagaaattaaatgctcataagcaatacaagcaatatctcccattgagccattatcacctctttttaagagaacataggcagataatttaaaaagcaagtcgcttggcatctctatctcataaagcgcagccatagctttaatagtcaaaacgacaacacttccgctagagcctataccaaatttaagtccatagcgctctaattttcccgtaatttcgaggtgaatcggttttatatttttgccaaaattaatcaaccattcttccataagcaatatcgtttcctgaatgagactatattgcttatctggctgtaagcttgccgtatagttaaacatatcagaataaaggctgtagttatctgcaaaagtagctaatgcagtcatataaataggaacgttctttaaaatagctacttgcccaggatacagtatcgcgtattcacctgcaatatataatttgccacctgtttgcaccttaaccatctgctaattcctttgtcgttgaaacaataatacgataatctttctccaagatagcagctaatgcctcaaggtcttgacgtaagcaaagtactttaacatttggacccgcatccatcgtataataacattcatgacctttttcgcgaagtttcttcacaacatccatagctttatatgtctcttctgtcaaatatgaaaaggctggagttgctgttttagttgttgagtgcattgcaagtgcattacgctctgtcagttgacctaccttttgaaaatcattattttttaggtatactaacatatcttgataatcttgttcagattgccttacccattcattaaaagtagttgaagtttcggtgcagattttcataccttcacggcttgaaatcggctttcttttgtcatttaagaccagcataatcatagctaaatctaaattagtgtgaactttatagatatcaccactatctttatcccaagcagcaacaggtccaaaaaaagagcgtgaagaggagcctgaagcaaacttggcttcttgagctagctgtgattggctaaggttagtaccaaaaaaatcattgcaggcctttactaaggctgataaaccacttgatgacgatgataagcctgcagctgttggcatattattagttgtttcaatctttacaaagccggacctattttgtcgaaagcgatccaagatagctgacattttgtcatgttcatgatcattttgaagaacaccagagatgtaaaattcatctttcttagcatccttcccaagggcagtcaaacgtgtttcagtgtacatgttttcaagtgttagagaaatactactggtagctggaatcattttttcagcatctgcttttccccaatatttgataatagcaatgttagcataagacttaacacttatactttttccgtccatgtgttgacagctccttctctttctaattgctgacttaagcgctcagcttctcttttttcttttacaagtgcgataatacaaccacctaatccgccgccactcattttagcgcctagagcaccacaactaatagctacctctaccagatgatcagcttctaaacttgagacacccaattgttttaaactttgatgtgctttagtcatcaagctaccaagttgtttggaatcacttttatgaatagcatcctctgatgcctctgctaaataacctaattcttttaaaaagggtagtactgcctcgccagatgatttcaccttatccactgcttctttagtatgcccatgaattcctgtatcagcaataactaaataagcattcaaatgcatgggtactgttgaaaaaccaatattgcggataaatttaatagtattttcactaagacaagtttttgcatctaatccactcggatttgaatgtgctatcatttctgctcgattaacaaggcattctaacaaatctgcctccaaatcttcatcaaaataatcaaaaactgcacgaatagctgcaatagcaactgcagctgatgatcccataccacgtctttctgggacttgtgactcaatatgatatgcaattttagaagaagttttacctaaatagtccaaggcagcaaaaatggctgtcgacaaaggatcagtcatatctaatgctattaattgaggagcctcttcaataaggcaagttacttcaatattttttaaaggaatagcaatggctggataaccatatactactgagtgctcacccatcaagataatcttgctatgagcctttcctataccaaacttttctttcatctttttctctttacaattctattaccttactattttaatataaatccttaaaaaaagcgactttaacgtgataataacataaattaaaggaactacaattgcagtccctttaatcttaaatgtaaatgacaaaggtaatggtatcatgtttataattcacatcgatacttcctttaaatagatgcaccaaactagttacgatagaaagaccaataccatatcccgattttttgttattatgtgactcatcctctcgataaaatcgttcaaaaaacttgctatagtctatgtctttaccattcttataagtatttgaaacttcaagcttagctcgtctcaaacgacttgaacgtgataacttaactgtcacagtccccataggatcacaatacttattagcattatcaaccaataatgtaaccaattcaaataatgatttttcttcagctttgacatgaatacctggttggatactcattataaagtctttaccatctttaatgattggacctttaaaatcttctgcagcatcttttgtaatatgtgaaaagtctaagtcaaccatacttatatcaggctgttcttcaaagcgggcaagactgaccatgccattaattagacccgttaaacgttggatttgatcatttgtagatttagtccactctgattcaccactcatcatttccaccaattcattattagcggagatgatagcaagtggagtttttagttcatgtcctgcattggtaataaaacgcctttgcttttcatagttagcaacaaatggtaagataactctccctgataaaactgaaacaattaccatgaagacgataaaacttaccaaggacatccatattgaaagttgcaataatctttgattatcaagatattggttggttgtatctaaaaataccactaaataatcatttttaccaaccttttttagtagataagaataagtactaaaattataggtgatatgacctgaatgactattttgtgatacgatacgcttggcataattttttatttgcctatcgcttacttcaaagatatttctagaatcaaaactagtcacgttaccttttgcatctgttcgcgcactgaaataacggaattggaaaatagcgtccgttgataggtcatcacctaattctttactaaattcaagtttattcggtatacgtccattgttgtctgcaaggatagttaacacacgataaatttcattcttcgtttgatagtgattagcagagttgaggacaccgactactgaaaataagacaacaagaatagctagcgcagctattccgataaaacgaagtcgtaaatttctaaacattagccaccatttatttcacttaatttatagctactaccttcttgaccaataatctccaagttagcaccaattgcctgcaatttttgtctcaaataagaaacatagataaagacgtatccctcatctacatcttcttggtccttatctgctccccagacatgttcgaaaagttgttgtgtagataattctttatcatggttcaacatgaaaaatgctaacattttagcttctttacccgctagacgaatagtgttttcacattgcaactcttgttcaccgactgataaggttactcttcccaatgacaatacattaggtgtgaaatcttccaatcttcgggacatagagcgaagccttgctaataattcttttagagagaagggttttgttaaataatcatctgcaccagcatctagacctgttactctatcatcaatttctgccatggctgttagcataataatgtgagatttatttcctgattgtctaatttctttgacagcctcaatacctgttttaacaggcatcatgacatccataaccatgacatcatatgcattttgattagctaaatcaatagcagtctgaccatcgtaggcgacatcaacaacataaccttggtgactaattgccgtactaaggacacgtgacatctgttcttcatcttctgcaattaatactctcattttattccttctttgttccactctctatcaattgacgaatcgtttgcatcgttaaatcaacggatgccatttcatcagcacaacgttttaattcccttacaattcgttcgggattttcaatatcatgcttgtatttcatttgatgttctaaactagcccaagaatcttgcgcaatggtacgcaactgaatttcaatgtaatatttaccgtctgaattacccaaacagtctggatagggggtatcaatttctaaaatcacatgataagaacgatacccatttggcttaacatgctggatataatctttttcaaccacaatacgacaatcatcgaatgccttaatacgttctataatttgataaatgtcgttaacaaaaccgcaaataatacggactccaatgctatctctaatcgtttttagtgcagaatctaccgttacaggtaactgtttgcgacgacatttctctatcatactatctgacgttttaatacgaccaatgatatgttcgtacaatttatagcctgtttcaaccttagctttatcattttctaattggatacgctggctgaaatcttctaaaattaatggtagatatcgaccataatctccataaatatttgtttccataagaaaccttcctattctctcttagcctccattatatcatagaaacttaaggcaaactaaaaagatggtaggtactgtgagactatttatacaaataattgttacttaaggatcttaccacaataatttgtaaaatttattgagtttgtcaagcaaaggcagttataaagttaagataattagtaattattttttcaaattctttttgtgattgataatctaaaacgacatgagaactactagaattatgatctgtttcaatgtatataaaaatttcaaattgagactgctcaataaatatggtatcggcatcattgataaactttctttttaatgtcttataataaaattccataaaatatatcctatgaatttccttttagtttcacactagcaaggggtttctctcctaaatatatctcggaatcatatttcagtatattaagagtctttaacggtataggctattaacctttctttgaaattttcttgatgataagtctaattgaaattatccattaccaacttgtcctgtattcgatttccatcccctagccaacaatcttttagttataaacttctaataacacctaataaataaagagtacttacttttatcgaaatatagaacaagactctctttgctaggttttatttttatatattttgaagatagtctgtactttatataggtataaaaaccgggataggaaatttggtgcatttaacataggtatattcagtttagcattatcttccttttaattagagcgttaagccctctaataatattttattccctttttaaaatgataaattgcaaaaaaagccatcaaatgatgactttttatgtagactcgcaagacgctcctctttagatatagctataattaactcattacaatccaaacacaccataacaaatagttcatcaaaatctatgatgtgattattaacaaaagaatcttataataacggtattggatcacatcgagtcagaagaattttaatttttacgtcgttttaaactgctagctgccaaagtagctgttgttgctactagagtaatcccaacaactccgagagttctattactttcctcgcctgtagttggaagaacagatttattggttggttttttagatgaagttaatactcctttgttaggtctattttctgtagtttgggtagatataaacttaggagactctgattcgcttggaatagaaattcccatttcctttggtagggtagattttactgattctcgatacacataagtcacttctgttgtgccttcagtgacctttccgaattcatttcccatagtttttgcagaaacgagtttataaatcttaccattaaatttaatttcagcgaatttataatctgtggtatcatatggtgtcccaacctttgattcgtgtgtatctagtattggttttttgataacattacctgtttcgtccacatagttaatcactacattccctacagcctctgattcatctttcttaagcttatattcatatgtaatggtctgatcttgttcagtcaccttaccatctgctggagcatcgcccttattatcacgcacatgtacaaattcatacaacttaccatctttttcaagagttgcaggtgctctatctgaatatgcttcatcaattggagcttctgatttaactgttttaacacttgcaagctcagtctctgtccctaaaataacatagcgggcatgaacatttccaactttaacgcttggaacctctaccactttacgatattgatagacaacatgttgttccccttctcgaagtgttcctttctccgctgctgatccctcttgaattgaaactagttcatattttattccatctttgtcaagtaacaatggtttctcagaatcattctcagctgtattataaggagtagcttggccttctttatcacgaatataagctgttggggtatcgacataggtatctttaagttttgtagcagtaccctcgataacataatctacaaccacacgacccttaggaacttcaacatattcatatgtaatggtctgatcttgttcagtcaccttaccatctgctggagcatcgcccttattatcacgcacatgtacaaattcatacaacttaccatctttttcaagagttgcaggtgctctatctgaatatgcttcatcaattggagcttctgatttaactgttttaacacttgcaagctcagtctctgtccctaaaataacatagcgggcatgaacattgccctttgattcttgtttaatgctataaacataagttactgacttagtaccttctgcaacttctccagatgctgcatcagtaccataattaaatgagcctccatttgtagccaacgtaccatccgaattaaccttaccaactggtactgtaatattttctgctactaattcatacaccttaccatctttagtaatagtgaaaggacgctcaactgtcgcgtctgaactaaggtctcctgatgattctgccgtattgtaatgtgttcctagaattgcatcggtggtatctttgtattcagtaccaataatattgccttctgtatcaatataatttacaacaactgatccacgcggattttgtaagcgaacagataaacgaagtaagtcatcgttcgaaatatcattattatcggaaattttatcatcaataacatcgcttgcgtgcttatttaaaccattaatactatctggtttaactacagttggtcgaatattcgcagtactattataatatccatctcctgtatgatatttctctttagaaaatgctgtaaatggaacagcttgatgatataatttaaatgaaacctctgtaaaggttccttttaaacgaattgaacctgttcccgctgggactgcatcaggcgttctatctagaccattgacaaagtctgcgtcagatggattaacaactgactcattaaaggtgtttttgtctgttacatcaaccgtattcgctgtaactgttaaattaactcctgaacttgctttttcaaggcttatacctggagttattaactcaaagaacgttgaattatatgaaccacgtgcatagtcaattttttcaacaatcctaccattttcattggtagtttctgtaaatgatagatgtgcattacctccaacaccagataagtcaataatagggtctgtaactgccttgtcaaatttcaatgttaaaatagttgatggcgccttcccattaaaattgagcttatcagatagtttactacctccttcagtacgtcctggttgtgtatagacacctaaagcaggtatttttgcaggatctacatttccaacaaacatttctgatgttgctttatattctgactgattaccaccatttgttaaaacaccagaaccttcatcattccctggtacaggagtaattgtcgcagtcactttgacggttgagttatcgtcacgaaccaccgttgtttcagcacttttaaatgattcatcacgaacacttggagaaatatttttatttcgaacactgtcagcatatggattttgtaacgtccaatcgccactagtagcatacgtcctcttgtctactgatggggctacattatcagttgttggtgatgttgctgctaaagttgcaggcttaatgatttctgaagtattactcaaattacttccttgagtgctagttgcactcctattagtggaagtaggagttgaattgttagaagtgaccaagtttgcatctgtggccgttacacctgttggagttgttgcagatgtaacactagttgtctcatctgcaagtacctgaggagaaatgaataataatgatcctatagcaactgaagctactccaaccgaaaatttacgaatggaaaactttaaacctttttcaaaattatatttacgaaacataatatcaacctccctgtaacagtttttatatttcacataatgaatagcaaaaaattaaaacgctgtcaattagaaaggtaaagatttttgaaaattaccctaatttaaaaatattttgactttacataaaactaaagaggagtcttattcaagataaattgaaaaatagatactaagacctggtagtttacataaaacagattcgatacttctatccaatataaagataattaaggagacttttaactaaaaagtgtctctgaaagctatttacaattgattatattatcacaagtctattaagcaggtttaaaatcatattatcagacactataaaaactatctggtgtagctgattgtattaaaatatttagtatatctatttaccttgctcattgtccaaatgggaggttcatctcaaagtattacagtataacaagttaaactgtagcttaaaaatttcctaaaatttctttacaatatcatcctcatcaatcatgttgctctttaacactaaaactacttaaacacaggaatttccaaaagaacaaaacagttaaagtgactaatcgtttagttcttttagattgaagttgaaatggtaaacgagaactatcggctatatttaaaaatgattctctagataacttacctttattaaatattgttaaactagcaatcctgtagaagtaattcttaccaattctctcttcatgtctttaataaaatcacagcattaagtcatcaccctaagatagttaatcaagattttccattgccatatttttagctaatgtcctaataacctttttggtggtacgaatctcttctttagtaatacctgctaacatagtactatgcaatttttctaagaaaatttcaaattgtgtagccttttttttacctaagtgagtcaaataaagatattttacacgcttatctgtcttagatggtacaatcgcaataaaaccatttttttccatccgttttaccaaattagaagctacagacttagaaatgtgtaagatttcttcaacagcttttatagacatatccttatcaggatgtttatagagatacatcactaggtgtccttgtggacccgctaaatgttcaacatcatattcttttgcataatgatctaaatacttttcaagttgattaacaagtattcgtgctttttgaagaggattctccataatcatactcctttaatagttaccgtgagaactattttaaaacaacctttattaattgtcaattaaaacttatcgtaagaactactcctacattaaaatttctaatatatatatatatatcattcgttaaataaaaaattatttcgcttactatccaagattaaaaatatatgttcgtttttttatatcttaaattataaatttatattgatttttaatttaaatgttagtaaaatacaaatgtaatatttatttaatttacaggagatttaaatgaaaaagaaaattattttgaaaagtagtgttcttggtttagtcgctgggacttctattatgttctcaagcgtgttcgcggaccaagtcggtgtccaagttataggcgtcaatgactttcatggtgcacttgacaatactggaacagcaaatatgcctgatggaaaagttgctaatgctggtactgctgctcaattagatgcttatatggatgacgctcaaaaagatttcaaacaaactaaccctaatggtgaaagcattagggttcaagcaggcgatatggttggagcaagtccagccaactctgggcttcttcaagatgaaccaactgtcaaaaattttaatgcaatgaatgttgagtatggcacattgggtaaccatgaatttgatgaagggttggcagaatataatcgtatcgttactggtaaagcccctgctccagattctaatattaataatattacgaaatcatacccacatgaagctgcaaaacaagaaattgtagtggcaaatgttattgataaagttaacaaacaaattccttacaattggaagccttacgctattaaaaatattcctgtaaataacaaaagtgtgaacgttggctttatcgggattgtcaccaaagacatcccaaaccttgtcttacgtaaaaattatgaacaatatgaatttttagatgaagctgaaacaatcgttaaatacgccaaagaattacaagctaaaaatgtcaaagctattgtagttctcgcacatgtacctgcaacaagtaaaaatgatattgctgaaggtgaagcagcagaaatgatgaaaaaagtcaatcaactcttccctgaaaatagcgtagatattgtctttgctggacacaatcatcaatatacaaatggtcttgttggtaaaactcgtattgtacaagcgctctctcaaggaaaagcctatgctgatgtacgtggtgtcttagatactgatacacaagatttcattgagaccccttcagctaaagtaattgcagttgctcctggtaaaaaaacaggtagtgccgatattcaagccattgttgaccaagctaatactatcgttaaacaagtaacagaagctaaaattggtactgccgaggtaagtgtcatgattacgcgttctgttgatcaagataatgttagtccggtaggcagcctcatcacagaggctcaactagcaattgctcgaaaaagctggccagatatcgattttgccatgacaaataatggtggcattcgtgctgacttactcatcaaaccagatggaacaatcacctggggagctgcacaagcagttcaaccttttggtaatatcttacaagtcgtcgaaattactggtagagatctttataaagcactcaacgaacaatacgaccaaaaacaaaatttcttccttcaaatagctggtctgcgatacacttacacagataataaagagggcggggaagaaacaccatttaaagttgtaaaagcttataaatcaaatggtgaggaaatcaatcctgatgcaaaatacaaattagttatcaatgactttttattcggtggtggtgatggctttgcaagcttcagaaatgccaaacttctaggagccattaaccccgatacagaggtatttatggcctatatcactgatttagaaaaagctggtaaaaaagtgagcgttccaaataataaacctaaaatctatgtcactatgaagatggttaatgaaactattacacaaaatgatggtacacatagcattattaagaaactttatttagatcgacaaggaaatattgtagcacaagagattgtatcagacactttaaaccaaacaaaatcaaaatctacaaaaatcaaccctgtaactacaattcacaaaaaacaattacaccaatttacagctattaaccctatgagaaattatggcaaaccatcaaactccactactgtaaaatcaaaacaattaccaaaaacaaactctgaatatggacaatcattccttatgtctgtctttggtgttggacttataggaattgctttaaatacaaagaaaaaacatatgaaataataaaaataggtttggataaaatatccaaacctatttttatattaatatgccttccaaatgatctaactcgtgttgacaaatttgagctggaaaatctgtcaacttgatttgctgttccttccaattgatatcacgataagaaatcgtaatgtgacaatatcgttgtgtacttctgcaacctacgagagaaaggcaagattcttctgtctcatatggatccgattttgcaactactacagggttaaacattactaaatttgtaatacccacattgatgataatgacacgcttcagactaccaatcatatttgctgccatacctacacaataattttgattagcatgcaaagtctcctgtaaatcttttgctaagctcacatctgctctactagccatttgtgatttttgttgtaaaaagaaagtatctctaacaattggttttatcatttattttaacctaactctattatgataatactagtataccataggttagctaaggactatgataagagattaaacaataccttgtgcagacatagcttgagcaacttttaaaaagcctgcaatgttagcacctagaaccaggttaccactatcgccaaattcatcagccgcttcggaagcattcacaaaaatagttttcataatacgttgcaattcttgatcaacttcttcaaaagtccatgccctacgactagaattttgtgccatttcaagcgctgaaacagctactccccctgcattggcagctttagcaggaccaaaagcaacccctgccttttggaaaactttaatagcacccaaggtagatggcatatttgctccttctgttactgccaagacaccattttcaactaataacttagcgtcttcttcgtctaattcgttttgagtagcacacgggaaagctaaatcagctttaatagaccagatactaccttgatctgctggtgtgaaattagcttttggatgtttctccgtatatttaacaatacgtgctctttcaacctcttttatctgtttcaatgtttcaaggtcaataccgtctggatcataaacataacctgaagaatctgatacagctacaacagttgcacccaactcttgtaatttttcagtagcataaatagccacgttaccagatcccgaaaccagtgcaactttgccagttaaatcttgaccacgcgctgctagcatttctttagcaaaatagactgccccataaccagttgcttctgtacgagccaaagagccaccataagtcagtccttttccggttaaaaccccattttgataaccatttaaacgcttatattgaccataaagataaccaatttcacgtccacctactccaatatcgccagctggcacatctaaatctggtccaatgtatttttgaagttcagtcataaaactttgtgtgaaacgcatcacttcattatctgatttcccttttggatcaaagtttgaccctcctttgccaccaccaattggtagacctgtcagtgaattcttaaaaatttgttcaaatcctaaaaatttgacaatagattgtgttactgtagggtgaaaacgtaaaccacctttataaggaccaatagctgatgaaaattgtacacgatatcctcggttaacttgaacctggcctttatcatctacccatggaactctaaaagaaatcacgcgctcaggctcaaccaaacgttctaaaagattttcttcaatgtactgagggtatttatcaaaaactggtactagtgactcaaaaacctcttcaaccgcttgtagaaattcttcctcatgctcattttgcttcttcactttctctaaaacacttgctacatatgtctttccgcttgtcatttattttcctccgtattgttttaatatagttagcattataaattgtcagaattttcttgtcaactatttgctatggtatcattattaggagcaattttaaaggtaattatttgacttttactgactttcgttctataatgagacaaatatttgattggagtatctatatgaaatggttcccacttgttggaggtataattgccttattagctggcttctatctctttataaatcctgtaacggttgttgcaactctgggttggttcattgctttatttatctttatttatggcatttcaaatttagtacgctacttgcaagctgattcttatcaccgtagcccttggtatctggttcagagtatccttgctattatttttggtatcattttactatccagctcagcaatgtcactttcaaatactgtcatgactattttagcatactggctactggtatctggtattttacgacttttgggtggtttccaaatgcaaaaaattaatttcccaggtgccaaatcctataaacgttcggcttatattgcactcattttaggtattattttactggttcaacctaccttatcagcagccatcattggaagatttgtagcctttatattaatagcaattggagcttcggctatttacacttttactcgtattaattattaaaaggacatgtttcgtgtcctttttttatctattgatgacgtcatttactatttgaaaattggctattatataattcgtaataaaatcctttatctgctaggagtttctggtgattaccttgttcgatgatttgaccatcctttagaactaaaatgttgtctgcctcttgaatcgttgatagacggtgtgcaatgacaaaactagttcttccttccatcaattttttcatagctttttgaataagcaattccaaccttgtatcaacagatgaagtcgcttcatctaaaattaaaattttaggatctgctaataaagcacgtgcaatagtcaacagttgcttttgtcctaaggagatattgcttgattcttgattcatcaccatattgtagccaccaggtaacgttcgaataaagtggtcaacattcgcagctttggcagcagcaactatatcctcatcactggcttcaagattaccgaatctaagattttcttttattgtaccttcatataaccaagcatcttgcaacaccatgccaaattgttgccggaaatcttggcgtgataggtgtctaatatcgtgaccatctacggtgatagcaccttcactaacatcgtagaatctcatgagtaagtttataagtgttgtcttacctgcacctgttggccctacaattgcaatcatttgccctggttctacatctaagttaaagtcgcggataagtggcttatccggagaatagtgaaaatcgacaccatgaaagctgacttgaccggttaagtcatggctcaatttttcagtgacttgattggcttcctcttcttcatctaagacttcaaaaatacgttctaaggaagattttgcactttgcaaaacacctgctaattgtgtaatggtttgaacgggttgactaatttgccaaacatactgcacaaatgcctgcatgttaccaattgttaaggtaccagcaataacttgtaaaccgccaacaaatgcaatgataagataaataaaatcagagatactattcaatactggcatcataattcctgaaatgaagctagctttgaaacctacatgacgtagattatccgttatatcacgaaattcttgactagacgcctcttctctaccatataattttatgatattgaaaccagttaatttctcttgtacaaaaccattcagttctcccagaatctttgcctgttctttaaagtaaggttgggatctttttagtatcgcttgtgcactaaaataagttacaggaatacaagcaatgataatcatggctaatggtacatttagataaagtaccataacgactactagaataatacttaaaaaagcattgataatctgtaaaaagctctgttgtaaagcatttgagaccgtttcaacatcacttgtaaaacgtcccaacatatctccaaattggtgcttatcaaaatacgatacaggaactttattgattttacgattcaaatcatgacggatatcacggatacttttttgaacgacagtagtcataaaataatttgagccataagaacctaattcatagaaaacacctctgaaaaaataaataatcagaataccagcaatataaggaacgttcaattctgccccagaaactcccttagccatatcaacaaggttagcagtcaactctgttatcgctaaccctaaaataaaaggctccagaatactcataaaactagataaaactttcaaaaaaatcgctaagaaaagagtagctttgtagcgagttaggtaagaccataatctcaaaaaaatagatttttttctcatacaatcactctccttctgataagttttggttcttcagttgtgactcagcgatttcacgataaatagcattattttctattaattgagcgtgggtaccacgaccgacaatttcgccttcatcaaggacaataatctgatcagcatccataatcgtacccaccctttgagcaactatcaaaaccgtagaatcaccggttacttcttttagacgcgctcttaaagtagcgtctgtcttataatcgagagcagaaaatgaatcatcaaaaatatataaatctggatctttaacaacagccctagcaatggataaccgttgtttttgacccccagaaagattgctcccaccttcagctaaatgcgtttcaaaggcttcttggtgactctcaataaactctttagcttgagaaatatcaaccgcttgtctaagatcatcaatagtagcatcagcttttccatattttaaattctctcctattgtccctgtaaataaaagagctttttgggggataaatccaatcttttggcgaagtgatttaaggttataatctcttacatcaactccatctactaagatttttccaagtgtcacatcataaaaacgtggaatcaaattaacaagagaagattttcctgaacctgttgaaccaataaaagcaattgtttctccaggcttagctttaaaagaaatatcatgcaaaacgggactctctgtttctcctggataagcgaatgttacattatcaaattctaaatgccctttaagtttcgtatccgtaacaccttcggtattaggattaatagaaatcggcatatccattacctctctaatacgatggctagataccaccatacgaggatacatagtaaaaagattggcaaatagcaaaaatgaaaagagagcatggaagctatattcgataaaagcaactaaatcccctattttaatagcacctctttgtaagggatccaaagcaaaccaaacgatagccacaatcattgcaataataatttgaacgaaaagtggttctgttagccctgttaatttaaaaagaccagttgaagtatctgtgtaacgttggttagcgacttgaaatttttgtgattgaaaattctctcttgcaaaggccctaacaacgcgtaaccctgttaaattttcacgaacatattgattgattttatcaagcatagtctgttgtctttcagataaaggttttgtttttatagctacatataaaataactcctaccaaaagaggcatcgcaaccgctacaagccaagctaaagatggactcgtaattagtatcataaccacgctaaaaatcattaccataggagttactaggcctaaacgtaaagacatttcagcaaattgcatcaaaacaaaagtatcgcttgtcatacgtgtcactagtgaagatacacctatctgttcatattcatgatgggagtattcttgaagcttagcatacatatcattacgcatatctctaatcattgttgtcgttaagcgactagatgcgtaagccatcgtaatacgcccaataatacctagtacaacaaatataaacatgatgaacgtccacagataaactccagtccgatcaccttttgtaacgccattatcaatcatacccgctaaggctgtgggcattcctaggataaccgtcacaaaaagcatagctcctagtaaatcaagccataaccaattggggtaccttttcaaataagaccaaatatatgccatatatgtctccttttctttcctcttatctcaaaataattaatccatgttcactaatccactttcaacttataaatctttaatcatccaaatatccatagctgtatgaccttgatcatttgctattggttgcgataaggcacaatatcccatatgcttataaaccgcagttgccctactcaaagtactggctgtctctaaataaagttgtctatacccaatttttcgagcttctacttcaatcattttcactaaatcagtagcaagccccttaccacggaaacgttctgcaatgtacaccttctgcatctctgcaattagatttttcagcggaccaaagccgccacagccaataatctcatctctctcctcaatgacaaagaatcctgacttctctattttttcgtagtatgaggtcaaatgatctaagtgagggtctgaatatgctgtatcaggtttatctaaatcataggcgcgtaaactttgtcgaattaattgtgcaactgcttggtcatcatttttaataatcggacggataatcatgtgtctaactcactaaggtactcataacggtcatacttttctagaagtgcttcattttttgcatctaattccttttgtaaatcagataaccttgtaaaatcactaccacatgtttgcatatcattttctatacgagtgatagtattttccaatatcataatatcgtcttcaattgtcgcccattcttgtttttcaaagtaagacattcttttacgactttgcttttcacgacttgtcttggtactctcttttttactgataacttcattattttgctcattaaatgctttttcatctaaataatcagtataattaccaaaaaattcacggatatcgttatcttcaaacgcaataattttattagccactttatctaaaaagtaacgatcgtgactaactgtaatcacaggaccaccaaagccttgtaaaaaattttcaagaacagttaatgtagcaatatctaagtcatttgtcggctcatcaagtagtaacacattaggcttttcaatcaggatttttaaaaggtaaagtctttttttctcaccacctgataattttgcaatttgtgttccatgtgtcgaacgtggaaagagaaattgttccaatagttctgtcacacttgttgtaccgacactagttttaacctcatctgcaacctcttgcaaataattaataacacgttttgagccatccatattatgaagttgttgtgaaaagtaacctacacgtatcgtttcaccaatagagacattacccgaatccggctgtaaatcttgaacaattaaattaagtaaggttgactttccaacaccattatctccaacgatgccaatacggtctttattttgaattaacaaattaaagtctttcaagatagatttatctgggtaagaaaaagagacattttcaaaattaataacctttttcccaattcgacttgtttcaaatgtcatttccaaatcgcttgtatcgcttgtttggtgtaaatcgttttttagattttgaaaacgattaatacgagcctgttgtttcgttgcacgagcttgtggctgagtacgcatccaagctagttcctgtttataaagctgtttctttttatgtaaactagcagcatcacgctcgtcttgttctgcacgaagtcggacataatcctgataattgccttgatattctgtaatctgtgccttatctaattcaaaaatacgtgttgcaacattgtctagaaaataacgatcatgagttataaaaagcactgtctttttactatttttcaaaaaattcgttaaccatgcaatagtgtcaatatctaagtggttagtaggttcgtctaagagcaataaatctgcatcatttaataatacttgcgctaattgaacacgtcttcgtaatcctcctgataattcaccaaccgacaactgcaaatcagtaatacctaatttggataatactgttttgacttcgctctcaatagaccaagcatctaaagaatccatttctgccattactttctctagacgtgattgcttactttcttcgtagtgattaagcaataattcatattctttaattaaagccatctctcttaagtcagaagaaagtacggtgtccaaaattgtctgagaatcatcaaagtctggttcttgttttaaataagcaatcttataatcattagctgatgaaaaaggggaacgatcaccatcaaaacctaattcacccgaaataacatctaatagtgttgtctttccagttccattgacaccaataatcccaatacggtctaaactatggatgataaatgaaacattactaaagaccgtcttatcaccaaccgacttagtcaatccatctactaaaaaatcgctcatataatcctctctaatccatcaagtactgcttaacaaaatgtaaaatagcctcttcttcattaatcagttgtcctaaaacaatggctaattcaatttgagagataatatctcccatctgtggaccaggttttattcctaatttcttgattaaggtgccaccattgacaactatctcatgcctatcatggattgctaactcactatctagttgttctattttttcgaaatcaaccatcaagcctcttgctttgcgaataccttccgcttgttttattatagtttttccataacgataaagatgttctttagtcaatcccatttgttcacgaatacgataaacatccactatatgctcaacatctttttgaaagtgagttgatgtcttccatttttttaaaaaagtctttgtgtgttcaacttccatactcaagatgagtgatgcccaagcttgttctgatgtctcaaataaaaaatctttatctaactgggacaaaaaggcgcttaattgtaattccctattttttaagcatggtagataattaaaagcatgactatctattagtgccagcattcctttacgccaataaggtgctaatagaagtttatcaaattcaataaaagaacgctcaacagatattttctccaataatgacgcgtgctttttcattgcctcaaaagttgttgtttcgatatcaaaatttagactagcagaaaaacgcaaaccacgcataattcgaagagcatcttcattaaaacgctcactggcgagtcctactgctctaagaaggtgattatctaaatcatccaatccatgaaagagatcaataacttctccatcttcatttaaagcaaaggcattaactgtgaaatctcgacgttttagatcttcttctagcgacctaacaaaattgacctgactcggacgcctataatcaacataaacctcctcagtcctaaaagtggtaatctcatattcaccacctttttccaatactaagactgttccatgttcaataccaacatcaactgtccttttaaaaatctgctttgtttcttctggataagatgacgttgctatatcaacatcatgaattggacggtcaagtaaaacatcccgaacactaccacctacaaagtatgcttcataaccggctttttttatcttttttaatattggtaaagccttctgaaactcagaaggcaaataatttaatctcatcatactattccaaatctaaacgaactaaagtcgcattattatttcttataaatggattcagaaacaaaaagaactgcctaagggacactccctacctactcaaattatcaaaaaagaatctcctaacttcttctttgatatctgcaataaggatcaacctccaagcaactctttttatcacacatcaatttttgggggtaataccaaaggcaaccgcaccttcaccaagatgagttgcaataacgccaccaaatgatacaatttctaaatcgtctttaagaccagctttagctaacaaattatataattgttctgccttatcttgtgctctagagtgaataatagcaatatcatattcaccatctgctgtcatttctttgacaatctcagccaagcgttttaaggcttttttctctgtacgcactttctcatagacaacgattttaccttcttcattaaaatgtaagaccggcttgatacttaaaaggttaccaatgatagctgaaccgtttgacaatctaccaccttttactagatgattcaaatcattaacaacaataaatccttcaattttttcaatttgtgattgtatcttgttaactatgacatcaaaatccatcccttcacgtgaacacatcaaagcatttctaactaaattgccctgtggtgctgaagttattttagtatccggaaaagcaattgtcaaatttggatgttcttcaataagaaactgaatattctgccagaaacctgatatccccgctgcaatgaataaaccaaggacgtgtgtatacccttctttctccaattgacataagagatcatctagttcagctaagctaggctgacttgttttaggtaattcttttgatgccgctagcttatcataatattggtctaatgtcagattttgtccctcaatataagttttaccatcaatgataattggaatatctaaaacatagacatcttcatgattttcgatagcctcaggcaagtaagctgaggtatccgtaataagtgctaatttcattaactattaaactccaatgttactcctggtctatctaaagcaatttctgtaacttcataagtcagacgtttaacgatttctaaaagaggagctgctagattctcaacttcatcttgactaaactcactaggctcattgataaggcgcccttggatatgagccatttgtgaaatgacaccagaaataacaaactcatcacgtacaataacaaattgtaacactgctacaatgctcgttacttttgctgcttcatctctattagctaattggaaagtaacttcaaaatttgtttttggggtaccattttcctcttcccattctaaattgcgcgcatcatagtggtattgattgacaaattcttgttcacgaatgacttccatgtattttctccttgatagacaatatgtattattatagcataaatttgtagattcttaaagcaggtgggaatctagaacttcttcttaggatgtctatcaatcacttcttgattgttactcaaggctgctaaacctttttctgtaagtgccaaccctctgacaacaaacaacttccctaattcctcttctgtaaaagcaatagctattgcctgatctaaatcagagcgtttcatctttgacaagccttttacgtttttttcttttaagaatagttttaaaagtggagcagataagtgatctaaagaatcaagcggtgactccattcttacaaatccattttttattaaaaattctaggtgttcttttccatttataccataaatgtattcaaaatattttgaaaaacttgtttcagttgtgaaagttccaaactgtatacgccataataagataatatctccaggcaagagtccttcactagtttcttccatatttttcctaggaacaactttactaaaattaatttcagccaagtctctttcaggtgagatataggggatattaggataatttttgtaaatttcttcaatagttttcatagtcatattgtagcaaaaaagcgcttataaaaacaagcgctaaggcatgggggaagtcacctttttgaaaaattcaatttcattttctgatattctaaccatgttaaaattatcatgataacatcaaatacacatagaaaaatcattaaaatgctatgactagaaaaatattcccttagttggaaaatgataaacccaacgaaaactaaaattgataaagggtaagcaaataatttctctttatgtaataaaataagtgctactaatttgataccgccatgaattaatagatagatagcggctaaatgactagccgaatcattaatataactgcttattttcaagaaatgagcagaaataaaaccatgaatcccaccgtgaacttcaccttcagttaaaagaaataggagatgttttatttgtgtaggtttaaaataatataataaaacgccagctactacttgtccgactgcaaatagcgtttttagatacaacataattgaaaaacttgtatcaactagttttgtttctttttcattccatttaatcattgcttacctcctttcctcaatcatattatccatttttttgcttaaataaatcatatcctattgaaaaaagattagcaattattaatgattaatctaccattcttttacaacataaaaaggcgaatagacccaataacgatagtttattcaccttttattcaatgtaaatttggataagttgagattaactattttattttacggaacaagccaaagagtacacctgagactaccgctccaattagaataaatagaatataaagtaaaggattacttgttaatgcgatgacaaaaatccctccatgaggagccatcaacttgataccagctaaaccaacaagtgctccagttaaggctgaacctacaataaagctagggattgcacgagctgggtcagcagcaccaaacggaatagcaccttcagtgataaaagataaccccataacgatatttgttagaccagattgacgttcttcattattaaatttatctttaaataataaagttgccacaaatactgctaacggtggaaccattcctccagccattacagctgccataacaacagagccgccatttgcaacagttgctgcaagagtacctgtaccaaaaacataagctgctttattaacaggcccacccatatctacagccatcataccaccaactagtaagcccatcaagactgctgaactaccagataaaccttgtaagaaagtgttaagagctgtgttgatagctgccattggaatgtttacgagcaacatcaagaaacctgtaatcaaaacacctaacaatgggtatagaagaattgatttaataccttcaagcgattttgggagacctgaaagtaattttctaagtagtaggataactccaccagctaagaaaccacctactaaagcccctaagaaacctgatggcacacctgctaatgctaaggttgctttcccaccttctgcaaaaggtactttaccgaatgccagtccacttgatgcaattgaaccagctacgaagccagctactagtcctggtttttcagctattgaataagcgatataacctgccaatactggtaacataaatgcaaatgctgcgccaccgatatttttgaataaggctgcaatttcatggtatgaacctaaattacttaattggtcttttggtacaccaagtatgttatcaaaaaggaaagcaatcgcaatcataataccaccaccaataacgaatggtaacatttgtgatacaccacccataaggtgtttataaaaagcagagcctaagcctgattttccatcagattcacctgattgtttatcattttgattttttgcatgataggtttgtgccttattatcgagaataatgttaattaagtcttcactttttttaataccatcagctaccggacgtgataccaaaggtttgccatcaaaacgatccatctctacagccttatctgctgcaataataacacccttagcccttgcaatatcacttgaagtcaacttatttcctacaccagaagcgccatttgtttcaactttaatacctacacccatttcagctgcttttttctttaaagcttcttctgccatatacgtgtgggcaattcccgtagtgcaagctgttactgcaacaatataatctgaacctttacttgttgattgtactgtttgtggagctactgtttcttgagaaatgctattactatcaaaagtagcaataatgtcatctggcgtttttgcttgacgtaattgatcagcgaacccttcttttaaaagatatttagatagttctgccaaggcagctaaatgcgtatcattagcaccatctggcgcagcaatcataaagaataaatcagttggctgtccatcaagtgcttcgtaatcaacacctgatgcagattttgcaaaaaggacagtagcttctttaacggcagcatttttactatgtggcatagcgataccatcacctaatccagttgatgtttgtgcctcacgcttcatgataccatctttaaaaatagcaaagtttgtcacaacacctgtgtcaactaattttgtaatcatttcatcaattgcagcctctttactggttgcttttaaatccataatcataacttctttttttagtaggtcttggattttcataatttttctacctcaactttattataaatatcttggataaactcagctgttgctaaatcatctgagaaagtggttgctgtaccacaagctacgccccattttagtgcttctactggattttttgacttaacaaattctcctgtaaagccagctaccattgaatcaccagccccaacggaatttttcacttcacccttaatcggttttgcaaaatatgaagcttctggagttactaacaatgcaccatcccctgccatagaaacgataacattcttagctcctttatctagaatcttatgtgcatatttttcgatatcaggcagaccttctagctctacgccaaaaatatctgctaattcatggttattcggttttactaaaagaggctgataagcaagagcgtctaaaagtgtctgaccttcaaaatcgcaaacaacttccgctcctgtctttttagcaattggaatcaatgtattatagaccttatttccaaggctagctggtgctgaacctgcgaaaactactgtgtcctcaggtgttagtctcgaaagaagtttctctagacgatgaagttgttcatttgttatcctaggacccccgccattgatttcagtttcaatttttgcttttactttaacgttgatacgtgtatcttcattaacagaaacaaagtcagttttgataccttctaatacaagtccatcttcaacaaaatgtcctgtaaatccaccgataaaacctgtagcagtattgtcaatttttaagcgttttaatatgcgactaacattaattcctttaccacctacatatttatcatcgctagtcatacggttaacactacccaacaatagtgtatctagacgaacaataaaatcaatcgatggatttaatgttactgtataaatcatacttgaatcaccttcattttctcttttattattgtcataagttctgaatcagtcttattagttactaaattaatgtcatttatctctttcactttagcaaatgtaacttgtccaattttagatgaatccattagaataaaggtttgttgactattattaataatagcttctttaatagcagcttcttctaaatctggtgtagttaaataaacttcatctataccattcatccccagaaaagctttgtcaaccgttatctgcctaatctgattaatggctacctggccaatactagcatctgttgaatgtttaaccgctcctccgataatgattgtttttatccctctatcaactaactttgcagcatgatgaatagaattcgtcaccaccgttaattgctcgtgagggagaaaatcaattaataattctgtcgtagttccggcatcaataaatataacatcttgctttgctatcagctttgcagtttgtctagcaatatccaattttttttgaacgtttttgatagctttttcttgattacttaattcctggccaagtgagtatggtaattcagcaccaccatgcaccctttttaaaaaacctgcagattcaagttcatctaaatccctgcgaactgtagattcagaagtctctaagatagacgttaattcatctaaagtaacactcttattttgctcaagtcgtgataagataatttcttttctctttgactttagcatagtccctccttgaattgaaatcgtttgcaatttaattatatctctttttctttcaatgtcaagcattttcttccaaaaactatcaataaactaaaaaagcctaatctaaagattagcttttacaaatactttaatttctcttcaaaacctttttaagaagctgaattcctttgtatttaaaaggacttggataatagttaaaagttcccattttacgaatgatacaaccattaaaattctgtttaaagcgaagaatactatctgaaccatcaaaagttccctgaatacctaggaggttatagaaagtagaacctcttttgagagcctcttgcataacatattcctgaagaactgctggtgcataaaatttattaaattctgtgtaggatcctgaaaagaaataaactgtctccttaagactataaacaaatagactaccagctaaaacaacgtcttggttatcatacttttgaataaatgactgaacttcttgtcgtcgtgtttcaaaactagccagttgattaattatttcagagcgttgcctatgatacttaggagagtctgcattttccctaaaacgttcatcaagcaatttaagcttattttccaatgcttcagcttttatttgcaagttatggtcgtattctctaaaatttaaagtggcaatcacaaattcagccttgccttcaaagctatcgtaaaaatcttgataataatctaaggacttatccatataatcacgtctatttgacgtagaagttgttatctctttaaataaatgtagctcatcacgtttaagaacgcgaaccttgattccaaaagacattgctttcttaaccaaagctcgtcctgtcttagagaatgaagatagtaacgtttcagaagtgacaccttctaaatttttaacatagtgccaagataaatatttaccagtaaaaccagttgttaaaccatcatggtgataacctgaactggtaaaatcttcaatcagattatcatttccctgattactaggaactcccgaactagtgaataattggtaatcatcataaggctcaactattaattctagaacaccgttggatttggcatagccttgcaatgctttataaaattgttttagatacttagaatttgaatgaactggtcctgaatcaattttcatttgaaaaccaccagtgactggcataatataagataaactgattatctctagtttattttctacttgatatcccaaatacctaacatcatagccgcgtttttctaaaagtttagccatctcaggtgtttgtaaaaatgattgtgaatcataatttcctgaatgttctttaaattcttctattgttaattctcgaagcgtcataaatacctttcttaactatttcctacttttctccacattctatctattcgatactatccaaataatataattttgacgtaaatctccactgttttttccaacacacataatattagtaaagctaaatctaaaaagatttagctttaaatttcaatatagcgacgaataccggaataactcttgtatgaaatccactgatgaccatctactactaacacttgatcataatgtattttttcacccttttgaaaattaaattccactggacttgatactttaggttgacttttcacatctacagttttagtaaatgtataggtacctgttttaggtaagttgggataactagtcggtttagtcgcctcatctttcgctttttcactacttgtagttagctttttcacaggaatatagcgacgaacaccactataagatttgtaagaaatccactggtaaccatctgctgtcaatacttgatcataatttattttgtcacctttttctaaagtaaattgggtctgacttgatattttagcttcattttttacttcagtacttccgataatattataaacaccagtctttgctaaaccattttcaataggttcttgagaagaattagttccagctactgtcactttagttcctgttacacctacaagtgtcccactagcttcttggtagtataaatgaatattataaagacccttctcattcttatggtcagcaaatgatacagctactttgtagttgccatccccagtagttacagctgtataccatttaatatcatcttgccctccttgttcagtccaaaccggtaccttaacagcagcgataccgttatcatctttaatattcgtaattaaaatatcaaaacctgtagttgtttcgttagaaatagtcagtctaccagttttagtaatacgggcttgtggttgaggagacactttttctttatcttcagttttttctactgaagatgctttacctagcaaaacaaaacgacgaacaccattgaatgatttataagataaccactgatttccttcaatagttagtatttggtcgtaaaaaattctgtctcctttgtccaatgtaaattgagttggactcgctaccttagcttcattttttacttctactttatgtgaaaatgtataatttccttgcgttgctattttctcttgattattgcttcctgaatttgttacaggagtaggtgctttagtctctgaacctcctgatggatctagtgactcaatagctgcgtatcgacgtacgccacaaaaagacttatatgaaatccatttcacattatctttattaaatacttggtcatagaaaactttatcacctttctttgcatagaaagctactggggctgattttgaaggtgtatttttcacctcggtttctttgctataaacataattcccttgttcaggtaatgttttttccaccattggctttgtctctactaaaggagtagtaatgtcctttgttgccgtattttgactatttacaactttatcagacgcttgaacactatcattattggaagtaatcacacttgacgcacttgtctcattggaagaattattagcatccacactagtgcctgtctgattattaacttgaaccgatgtagtttgatccgcaaaaacaggacttgtgaccattatgaatgaccctaaaattactgatgctaaaccaaatttatatttacgtagagagtaagattgcttagtatcatttacttgtccttttttcatcataaacacctacttccttatttatttacactactattataatatcctttttgtaacatgtcaacatattttagaaatatttgtaatacaaatgtaatattttatgctgtaaatacttctcgaaaaaaatacccaactcttattattcttagtataacaaaatcattatcattaagcatatcaaaaaaccgggcactattctcccggttgattattattttatgctaagtacattttctttagtgtgaattaattgtgtgattaatcgacagtaaggtgtatcaatgcctaggttttcaccttttttattcactgcgccatttaagaaatcaatttcagttaagcgctgattttgaactaagtcttgatgcattgaagggtaatgatgggctgctttaacagatgtatccataacgtactttgttatttcttcttcatcaagctctacaccttctgcttttccaacagtaacaaattcatggataatttcatgtaccatatttacgccgtcttcactagcaaagagttgaccaattgtacaatctagcaaggcgcaagttgaattcatcgttccgttaacacaagcttttctccaaatatttggcaaaacattttcgtcataagtagcctgtaattttgcttcattaagcaattcagtaacgcgatgacctgcttcttgattgttaggatcgatactttgaagatttacagaaccaactccttccagatgagcatgccctggtcctttcaaccctgcagtccaaactgttactcccatcaaaatattgtgttcagggatatattgacgaatgacatcttcatgtcctaatccatttaaaagacataagacctttgttttcttaccaataatttttttaatatcttgaagcatatttggcaactgcattgctttagtaaacaaaataattaaatctgcttcttctgtcgcatcagttggcttcatgataggaagtttaacaaggtcctctgtatcacctgttaccttcaagccattttctttaatagccataatatggtctgcccaattatcaagtaaaataacatcatgatttgttttagaaatttgatatccaaaacgacatcccatagcgcctgaaccagcaatataaactaacatacaacctccaaattaattttgaccttcaaaaacgaaaatatcgtctttataaagtttcagaatgtctttacaaattttgtgtgatacaaaacctactgcaaaaggaataacgagccaagataagataacaatcaacatacttgctcctgcttcaaatgaagcaatcggacctactgcaccaacaagcccaaaaccagacgaagctggtgtccccaccaatttaaacaatgggactgttagagaacttactgtagcagtcataagcattggaatcgccattactggatgctttaggaaatttggcatcatcatcttcattgcacctaaagcaatagcaattggaactccagacttattagccttcatcgttgcccaaactagcactgctgttgttgaagcaactcccattgaagctgcacttgctgacataccattaagaccaatcgctagaccaatcgctactgttgaaataggacttacaataagcattgaaaaagccatcgcaattagaattgacatcgcaattggttgtaaagtagtaaaagaattaattccttgaccaataagtgttgtcacatatgaaacgtaagggagtaatttccatcctaaatagcctacgcctgtacctatgataataggtaacaagataatggttagggaaccaaatttattaccaaaccacttaactgctaaaactgctaaagctgctgttagcatcatattgatgagatcaccaatcccacgcaattggaaactaccagtagcaactcctttttgaataacttctgtgtaagcccacgcaccagaaccaatatatgcagcacctccaacagcaagctgttgcattggggtgaatttaaactgttgaccaatcaaaaatcctgccataattggtgtgaaaaattggaatacctgcacgatgtgtaagaactctgcagcaagtccgtaagataaaaatggtttcaaaaaagtggctaggatagcatttgggatgagtgctacaacgattgcagttgctgtcccacctaacactttattgataaaagaaccagccgtctcttttggtgttaccgtatttgtcataaaatacctcgcttcatttatttaatatcattcataacgacaaagttaattatatcacaaaataaataggaagctttgttatttttttaacaatatatataatccttttttataaacttatcagttttatttatagttattttatcaatgatgttgaatggactacacggttatctcgatcaggataaatataattgatagcttggtttatagcgactggtgcttccccatatcctgttgcaatcaattctacctttcctggataattagcagcatctccaatagcatacacgccttcttgagtcgtctcaaaaagtgaagaaacattgatactagaccgtttataatccaaattccaataacgtaaatttttattagaagtagaaaagccaaaactaacaatcaagttgtctaaaggtaattcaattacttcatcacctttaactttttgaacgaccaagctgctaactctctgactatctccatttaaaccaattgggacataaggggttaaaattctaacacctgatgcctttagtatatccacactatgctcatgcgctctaaaagcatctctacgatgaacaatcgctacactagctgcaatcttatctaattcattggcccaatcaacagctgagtcgcctccaccacaaataacaacatgtttacctgcaaactgttctaactttgtaacgttatagaataaattattatctgcataattttcttcattttccaaacctagtaaacgcggagcaaaagcaccgttgccacaagcaaaaacaatagcacgtgacaaatgttgatctttatctgtttgaattgtgaaaacatcatctactttttcaaatgataaaacttcttcttttaaacagatttcaatagaatctttaaatctctctaattgttcaatatgtttatcaattaattcacgtccagtaatcaccggataaccaggaatatcatagatttttttctcaggataaaggatagctggctggcctcctaattccgaaaggctttcaataattttaacggatactccgcgtagtccagcataaaaagcagcaaagagacctactggtccgcctcctacaatagtgatatcataaattgttttgttcatttactgtatctgttctttctatttctgttttaattttctctaagataagtctctcttcatccgtcattgcataattttctaacaagtctggtcgacgttctagtgtttttcgcaaactttgttctaaacgccattttcggatattttcatgatgaccactcatgagaacatcaggaactgtcatgcctaaataatcatatgggcgcgtatactgaggatattctaataggcccgatgaaaatgaatcatcctgatgacttgtttctttacctataacttctggaatcagacgaacggtagcatcgaccattgtcatagccgccaattctcctcccgtaagaacaaaatctcccaaagatacttcgtctgttactaatgattttatacgttcatcataaccttcatagtgaccacaaataaaaattaattcatcttctttggatagttcttctgcaaaatcctgatcaaatgttctgcccgctgggtctagcaaaataacacgtgctttttgagcatctattttatcaattgtatcaaaaataggttgagcacgtaaaagcatcccttgccccccaccgtaaggctcatcatcaacatgtcgagacttctcagcattttctctgaaattgtgataattaatttcaagaagtcctctttcttttgccttaccaactatagaatgttccagaggggcaaacatttcaggaaataaagttaaaatatcaatcttcatcatctaaaccttccatcaattcaacttgaacacgctgattagaaaggtccacttctaatactactggcgggatatagggtaataaaagatcacgttttccatgacgttccacaacccaaacgtcatttgctcctggttgtaaaatttctttgatttttccaatcagctcttccccttcatagacatctaagccaataatttcatgataataaaattcaccatctttaaggtcgctcagttgatcctctgccaccttcagtgtgaaacctttatatttttcaatatcattaatatgatacattcctttgaattttataatgtcaaaattcttctgcttacgatgactagcaatttcaatatccataacaaactgattcttttcatcgaataaagctaacacttgaccttttttaaagcgttcttctacaaagtcagtcacgcttaatacacgcatttcgccttgtaatccttgtgtattgacaatttttccaacgttaaagtattccatagtaactccgatatttttgaaaataaaagaaaaaccagccgctaaaatgcaactggccacgatagtccgtacgggattcgaacccgtgttaccgccgtgaaaaggcggtgtcttaaccccttgaccaacggaccatgtgaaactggggtagctggattcgaaccaacgcatgagggagtcaaagtcccttgccttaccgcttggctataccccaaaagacaaaatctagtatatcgaaattctagattactgtcaatatcttttcgaattaaattttaaatttcgattttatcccttttaataaagctcatatagagtctatcaaagtattttatgtttcatttttgaaatatattcaaaaactttttggtcccttttttcgataatagcttgtaaaagtagttcatggtactgcttattattcatcccaatttctaatatatcttgtatagccacacctgagtcattttttaaagaagatatatagcgtctctcagcaataatgatatctgctttttttagtaatttttcatctatctgagtcgtttgatagtttacaaaaaagaattccgctatcttagatgtaaaatattggtttaacattacttgataggtttgtaatctaatattactagatgaaattacatatacagaaagaggagctaagaaagtctctattaagttagataattgcattgttagtagcactgtctcatgttttgaaaaagttaaattccctcctttaaggttaaaaatatcagccagacctttatctaataggtgatataaatccttagaatagctcagccttgatgtatttaaaaaataaaaatcaggaataaaataataacaataacaaataaaatgtctcaaaaaataggcattaatatctttaaaatgctgcgagtcaataaattctctacccaataatcgaccacaaaaattcttaaaggctttagactttgatatcttataagaagcaaaaataaattcttcgttgatattgatatcatctcgattgctaaatagaggaccatcactaatacaaaacactaaatatagataatcaagtaaaccttcattcaactctataccaagatgtatagcaatactcttttgagctgctttggataactccatgtagagaatagatttttttagttgattaaaggattctgtttgaggaatttctactttatattcttttcttttccaaactaaattcaccaaaatataaaaatagtaatattcttcagataagtctttaaggtcgtagtcacaccctttaaaattcgagtattcaataaaatcccttatcattacctcacttgtagcatcaaaaggataaataataaaaccaaaatgatactgtaacaaagcaatcagcagcctaatctgatattctggacctgtcactttatttttttgtattgataacttaacactctccaaataaagtttacagtttttctttattcggtaggcacttgcgacggatatgaatttcttagccgtgaattcagaaaaactgacattttgaggagcaataaaatatgccaaaaactgtaacgtattagactctcgataaatggtatgcaaagtctctagcttagaaagtgtttcgtaatggaacaataccattgttctacttttgacaacaaggtagaaatcagaataaagtatttgtagttccgaaataagaccttgtaaaatcttttcactcaaagcatattctgttttaaagtgatcaaggttaatttctccatcatcaagtaaggcggtcatcaggtatgctttcagttttattttttcttcgagaaaatcaaatagcaatatcttatcctccttaataaaaaatcagaaaattccctttcacatccattatattctaaaagactaaaaaactcacaatttttgtgtagatataacaaaaaagacaggaagttcctatcttttagaataaattattctttctcatcaatgatgagtcttacttttttcccttgtgttggtaccgaatagacaatcgaccttatcgctgtaattgtacgaccctttttgccgataacacgaccgatgtcttgggtatctaaatcaagatggtactctaaaaattctgggccatcctgaatttttatggttaactgatctggttgtgaaatcaaaggtttcacaatagcaataatgagattttcaatggtatccataagcttttattattttgagaatttttgatcgtggaatttagtcataactccagcttttgaaagaaggttacgaactgtatctgaaggttgtgcaccttttgataaccattcaagaacacgttcttctttgattgtaacttggttttctgcaactaatgggttgtatgttccaacagtttcaataaaacgtccgtcacgtggtgcacgtgaatctgcaacattgatacggtagaaaggtttcttcttagaacccatacgagttaaacggatttttactgccatttttaaatagtctcttttctttttctttatatttggtcgttgatagcttaactaacaactttaccttactaagtataacataaatacaaactctgtcaagaaaaaatcttgacagagtacatgtttttttattcatatcgtaaagcatcaattgggtttaatttgctggctttattagcaggtaataaaccaaatataattccaataaatgctgagaaaattaaactgcctatagccacgttaagtgacacagaaggagtaatcttatcttgcgcattagcaattaacatcgtacctccataggctagtaataacccaattaatccacccaaaatcgttaagaccattgattcaattaaaaattgagctaaaattttacgtcgagttgccccaagggctttacgaaggccaatttctctcgtgcgctcagttacagagactaacataatattcatcactccgataccaccaactaggagagaaattgctgcaatcgctccaataacacctgtcataataccaacttgggtattgatagatttaactatagatgtcatgtcaaaattatcatagtacccatccttagcatgactaatgtctgttaaacgtttgcctatttctttaccaatgcgattggattgcgatacatcattaagatgaaaatatatgttttctgcttctttagcaccaaactccgaagctaactgtgtattggttaaaatagcattcccatcagaattacttccatataagcctgaaccagcttctggatccgaataaacccccactactaagtaagatttattttttacagtcaccaccttatttaacgctgcttcatttgtctggaataatctctgagctaatttttcttctagtaaaataactctcgagaattggttataatcctcctcttggaattgacgaccacttttaattttgaactttttgataccaaggtaagtgcggttaattcctgttatattaaccgtctttgcctttttttcaaggtaagctactggagcatttgtttgattggttacatagtagccactaacaccatctacttccttagcaatcttttttaaccatgattcttgaataattggttccttacggttggtatcactaccttgcatgaaagccccttgagctccaaagttatcctcatttttttggtcttcttttgttttataataaatctgaaggttcttctgagactttgtaatctcatttgtaaccgaatctttcatgcccttacctaaggccataattaacacaactgatgcaaccccaatgatgatccctaacatggtcagaaaagcacgcatcttgtgccctagaatcgatgatagggcaaacttccaattttccataatcgaatctccccttaatcaattctaatactatcagtagtatctgctgtaatttcgccatcacgaataacaattttacgagtcgcataatcggcgatttctggttcatgagttaccatgataatggttttaccttcttgatttaattccgttaggaactgcataatttgctcacccgtctttgtatccaaggcaccagtcggctcatctgctagaataatagatgggctattcaccaaagcacgcgcgattgctacacgttgcttctgtcccccagataattctgttggcagatggttcatacgctctcttaattcaactttatctaaaaattgttttgctaaatttttacgctttttaggaggtacacccgcataaattaagggtaattcaacattttgtaaagccgttagtttagataacaagaaaaattgttgaaagacaaaaccaatttccttatttcgaacttgagctaattttgtttgacttagttcttcgacacgtttaccatttaaactataatctcctgaagttggagaatccaacaagccaataatattcattagtgtggatttccctgaaccagatggccccatgattgcaagaaattcaccttcataaaccgtcaaatcaatgttctttaagacttgaagtttttgatccccattttgataacttttaacaatctgatgcaatctaatcagttcttttcgattagttgtcacgattatttcacctctgatttcttattagagttaagatcgattgattcaatattatcaattttttgcccatccttgaaggttttacttggattagtaaccacgatttgtcctgctttcaaacctgataaaatttcttgtgtcttagcatcagctttaccaattttgacttcaactttggaaattttacgattagaatcattgtatacccaaacaaagtgtttattatctttgtttatcacagaacttgtagggacaataaggtgcttatctccattaactacttcaactgatacggtaaaaccttgttttaatgcatcgagagggctagtaatatctactttatatttataatttacagcactagagccgttattagagtcattgttgtttgcttctgcttctggataatttgagatatatgaaattttaccttcccattccttgtcaggatagaccttagattttattttaacagcctggtcttttttaacattagccaaatcatactcactcatcgttccttgtacttggagtttaccttcagttgctacatggacaagtacttgactagtttttgaagctggatcaatatcactattaacttcaacaactgtccctgatacgtcacttgtaataacagtatcattcaatgctttttgtgctttatttacttctgcctgtgcatctgcataagcatcattcaaatcttgaagttgttggttgtatgaagcattagcttgactttgataattttgctgtagacgattcgtcgcaccactagtcgattgagtcccttgtccttgtgatgatgaagaagattgatcacttgattccatagctggaagacttcctgttgtctttagattattaatctgacgcgctactttatttaattgacgattagcagtgtcgtaggctgcttgtgcagttgttgtatcatattgaactaactgctgaccagctgtgattttatcacccactttaactgtgacagttgctcgattacctttattagcatcaaaatacacatactgttcttgattagccttagcttttcctgtcaaaagagttgaggacgaaacacttccttctctaacattaaaaactttgtagttagtttttactgcactcttattaggttgagattgtacccataaaaagccacctattactacaattagtgccactgagagccctgatataattgctccttttttactaattcctaaattttgtcgtttactcatgtccatctcctgtttgtattattaatatagaacaagtgtattatttttaaataatattgtcaagaaaattctttaaaaataatatttttactcattaagtatactattttgctcatagaaagaacttacaaaattgaaagtactttactttttaccacaaataaaagctgagatatagatctcagcttttattaagaattgctaaatagactgacaagagatagaaaaatttttcatttttgaaaacatgtctgcttgactttctcccaataaatacacttcttccacctcttctatacccataattgttaatatggtctcaatacctatagtgtcaaaaattatagatgtatcatttaattgttctatgaggagaggttgattggtaacaattaataattctaaatgagtttgtttgatttgcttaattaactcatttaattttactagggaataacccttgtctaccattatcaaagccttttgacaaccgctagaaatgtagtctgaatgccaatcatagcttcgaaaatactgaatttgatggccagttagaacaccagaactttgttcgacttgcttcagaacaggtgcgacactatgtttttttcgatattctaacatgtctatcaaagagatttgccaactactagcaatatagtcatccgaaaaaccataccttttagcttccttataaatatctacattatattggcttttattcaggttttcatacaactctacaatatgtaaacatttatctaagtaaaaagggttgattttagtaactgaggataaatcatacaaatcaaagccacgtctaaaagcctccaaaagataagctagacgattttcttttttctgaatcaaagcaaacatcaaatcttcctcgctaatatcactcagaaatggaaaatgatcatgactgctagcctcgagtaaatttaaaaataattgctctatattacgagcaaaaaagatatagtcaactttttcaaaactaaaagatacggtagctacatagtctaattgcggctctaaaaaggcagaggtatttgggtaataagaatgcttcagttgactaaaagtatatcccactgtcaatttagttgctatctctaaaacaggataggtcgtaatagtctcaaataaaatgctttgatgagacaaaccagatgataaactaattatatgataatccaaactgttcaaatctattaagaaactaaagtaacatactccaataatgtttgcttttcgacacacatcaaatgcaacatctcgaattgtttgcctagcagcatcggataaagtttgacttggtacaatcgctagagacttaccagttgttttattagattcaatatattctaaatcagagacatataaacaattattcaaagagtctctcattactaaacaatctacttgcacaaagtcttgattattgtctattgcctgaacacttttttctgataaattatcgctgatatactgccttgaataatgactctgccacgctaaaaactcttgaaatagctcatgatttttatctaagcaaagggggtaaatcaaactatcttcatgtgtatttatataccccacaagcgtctcaagattttcaaattgtgcatcataatggtgaatcacatggtttagctccttcgagataagaatactaacaggtctatcccttttagataacctctcaacagttgatctaattaaatcgtcatattctttcattttctgtccgaaaataataagcaaaataggctgtttatcctttgtatttagcatatacgcacctccttattaatcagctcaccgactgactttaaataataccttatgtttaagcgcgtgatccaatcatttctaaaaattcatcaaaaaaataggtcacatcatgagggcctggagcagcctctgggtaaaattgcacggacatcactggaaatgagcggtgccttagagcaacaatctcttgatcattcaaaccttcgtgtgttaccagtaaatcatgcggaagatttagccggttaacggtaaaatgattaaactgactaactgtttctaaacgacccgtagcaatatctctcatgggataatttggccccttcttagcaactgggagtctcataatttctgcaccatttgccatggcaattaattggtgccccaaaccaatacctaacataggaacagatttttgtaattctttaatagtgtttaagatttcctgaagcttttctggattccccggaccattagataatatgataccttctgggtatagatttttaataccttctaaagacgtattgtagggaatgacagtcacgtcacactgacgtttagacaattctctcaaaatagaatgtttaagaccaaaatcaagtacaacaatatttcgaccgctagcaggcgacggataagctgtttttgtcgaaacttgttccacattatttgtcggtaatactgtcgctattaattgatcctgtaaatgtgataaaacatcacctgcttctgctaaagtagcttttacaaatcctttttctttaataacttgcatcaaataccttgtatcgacccccgacattgcaggaacctttttcattttcaaaaattcatctagattcatcttgctagtatcgctacttacacatctggaatactctgcaacaacaactcctaaacaagtgggaataatggcttcagagtaactgcgatgaataccataatttcctattagcggtgaggtaaaaactaaaatttttccattatgtgaaggattcgttattatttcctgatagccggtattccccgtacaaaaaactaattcgccagttacatcaagagatgaaccaaaggatagtccttcaaaaaccgtaccatcctctagaattaacaatttttttgccattgtggttcttccccttctataaaatcatcgtaaataatagtcgtctacttaactcggatcaataatactcacacgatcgtaaccatcatgttccatcacttcaactagaatttcttcaaattgacttgttggaatatttttccccacataatctgcacgaataggtagttcacgatgcccacggtcaattaatacagctaaactgacacgactcggacgccctaaactaacaagattatcaatagcagctcgaatagtgcgacctgtatagagaacatcatcaattaatataatatctttatcagtgatgtcaactggcatagttgtggtgtcaacttcaactttcatatcatcacggaaaggtttagtatccaattctccaacgggaatatctaaattttctaattgcttcaagcgttcttgaatgcgtttggctaaaaaaacacctcttgttttaatgcctgctaagacaatattatctaaatttttgttacgttctataatttcgtaggtaatacgtgtaatagcacgtttcatggtcacatcatcaataatttcttttcttttcattgcagtatcctctctaagataaaagagccccttcaaaaggagactctctagaatgacaaagccgctcaggcattgatttagtctgaagtttctccttaactatctcactggataaggttaaaggaatgatttgcttatattatagcaaatggtaaaagtatttttcaagaaaaacttaattttttctcaacttttctaaggttgtctgaaaaatttccggaacctctactgaaaaaatcaaattctctccgttactagggtgcgtaaaacctagtgtttgtgcatgcaaaaactgtcctttaccccctaaagtcttacggggaccgtagacaggatcaccggctagaggatggccaatataagccatatgaacccgaatttggtgtgttcgacctgtctccaatgacaattcaactaaggtataatcaccaaaacgttctaaaacatgaaaacgagttattgctggcttacctttagcagtcacggcttgcttcttacgatctttatcgcttctaccaatcggagcctcaatcacacctcgatcatttggtaaattaccatgcacaattgctaaatatttacgaagcgattttttatcttttaactcttcagccaacacttggtgagctctatcattttttgcaaccatcaataaaccagaagtatctttatcaatacgatgaacgatccctgggcgaacaacgccattaattgatgataaatccttaatatgatacatcaaggcgttaactaaggtgcccgaactgtggcctgcagaagggtgaacaaccatcccttgcggcttattaaccacagcaacgtcatcatcttgatagataatatctaaagggatattttcagcttgataatctagtacttcctctttaggaatatcaaaagtaatccgatctccttcttgaacagtatatttcgctttttttacttgtccatttactaacacaatcccttttttaatttcttcattagcttgactacgcgacagttcagaattatccgctaaagctttatctagcctaactcctgctattttaattgtgatttccattactttcctctttccaaagtgcaatcattaagcaaataataccgattgtcagatatgagtctgctacattaaagatagcaaaattaataaaatctaaatgcaccatatcaacgacataacctaatcttaagcgatctataaagtttcctaatccaccagagatgattaaggttagagaaattaataaccaataacttccattaatatgtttcatcaaataaataatagcaacaccaacaacgaagattgtaattaaggtaaaaagccattgttgattttgcaaaatagaaaatgcagcaccataatttctcagataagttagactaacgatatttggaatgaattccttaatttggtttagttcaatatgtttaacaatccataacttagatagttgatctaaagcaatcaacaaaatagttattattggtataataatctttctcattacttctcctatgaattaaatcccttaaaatactcttccataacagcaacaaattttaaagccatctgagataaattacgatcttttcgtttgatataaatcatttggttatctagatgatcttctaatggaataacagtgataccattcacactgcggctatccaagaatcctgagcccgtcgcataagcttgggttctttctaaaataccatttaatgttgctctatcagtaacattataggtaacagaactatcaagtacttccacaaaattctccgagtaataccgataatcatctctatcctgtgtaaaacgtacggttggtaatccttctaaatctgtcattatcagagatgttttactagccaagggatggtctttcccaagataaatatgagttttaaaaggaataagctctacaaactctaaccccaatttgtccaaccgctgaagtagaccttttttattttgactattgatataaatgatacctatttcgctattcccttgagcaacttcatctaagatacgtattgttgttgattcgaaaatacggaaatagctaaaattatcattacattttgaaaacgctgtgattaaaggaggtagaaaatcataatgttgacttgctattgagaattcttgctctgtagcttcagattgcgaaaactgtttttcgaatgaatcaaagcttttcacaacttctaaagcattctcataaaaagtcatgccttgattggtcaacactgcaccagtagttgtacgcgtaaaaatctgaaaccctaattctgtttccaaatcacgaacggcaacagataaacttggctgactaacaaatagttttgcagctgcttcacgaaaagtaccactatttgcgatagcaacaacataacgcagttgttgaatattcattttatcacttcctcattttagtacccttcattataccaaaaaataactatccttgcggaaaattcttcatgaattaggactatttcactataaaagaacaacaaagtttatgagtattaatgataaatctcttaacatattgtcttttgttacaaaatgaaagctctgacaataataaaagaccttatgaatagtcataaagtcttaactaggcattattttgcgattgggtaaacagacacttgttttttatcgcgtcctttacgttcgaaacgaacaacaccttcaactttagcaaaaagtgtatcgtccccaccacgtccaacgttagcacctggatagatgtgtgtaccgcgttgacggtaaagaattgatccacctgatactgtttgtccgtcagctgctttagctccaagacgttttgcttgtgaatcacgtccgtttgatgtagaacctccaccttttttgtgggcgaaaagttgcaagttagcaagattcatttttaacataatgttgtgtcctctcttaaattagtgtgtcatgactactgtactaacaaattcagaagaatctttagacagattagtcattccaagaaggtaagactcaaataataattgaaccttatcctctttatgttgtggtatagaagataaatctatcttcatataaccaccttcaacgtcattgataatcaattgcgcttggcaggttgttaaagcctctaatgaattaataaaattaattgataaagtactaacagctgcacaaatcacatcaaagccgtactcgccactaccagcatgaccgctgatttcagcactataaagatagcctgattgattacgagtaaaagttgctttaatcatgaaaaattaagcgttgattgcgttgataacaacttttgtataaggttgacggtgaccttgtttacggtggctaccttttttaggtttgtatttgtaagaaacaactttcttttgtttgccttgtttttcaacagtaccaacaacagtagctccttcaacaactggagtaccaactttagttgtttcaccaccaacaagaacaacttcgttaaatgtaacttctgctcctgcttcaacgtcaagtttttcaacgtagatagcttgtcctacttcaactttaacttgtttaccaccagttttgatgattgcgtatgtgctcatgatgcacctcctataaaaatttcttgtgaggtttccctctgtgaagactcgcctataaatcgtgagagccttgctctacttaatctaacgattttcgcgcggttgcacaggatgtgcatttagtcaacattcaaattttatcataaactctttttttatgcaagataaaacaaaataaaattatcaactttaccacttcaaattaactaactcattcatctccttatatgctttatcaactttatctttcatagtctgatcaatcgtagaacgtttcttaccaccttcaatataatcctctaaaactagcgtcctataatcataagctggaaagccttcttcaacataacggccatttggttttgcttctactagtgttggatgcgccttaacttttttaattactgttttttgaccttttttctctatggttacatccattaataatcctctttctgtccagatatcatcaaccgtttctaaacgctgatttgaaataaaatttcccatagagtaaataataaattttttctggccatctttttttatcacttcagacggttcaacaacgtgagggtgtcctccgaatataatatctgccccccatttaatcatactatgataaagcattacttgttctgtagtaggttttttttgatattctatccccatctgtggcatgacaatggtgatatctgcttctttttcagcctttttaatatcttgcttaatctttttagtatctaaatcagacatatgtttttcatagtcactctttgaaacattagcttccataccattgtagccatacgaataacctaaaatagcaattttaataccatttacatgcttaattaagatatcttctttatttctatcctttaaataaaccccaatagtatccaatcccagacgattaaaagtcttgacagtattgatagcacctgccagttgtgaatccagaatatgattatgtgctaagtcaacgacatcatatccagtttctttcatagtagttgcaatctcattaggagcattaaataaaggatagcccgctaaaggatattctgaactaatcgtcccttcataatcaccaatcgctaaatcagcgctctcaatccaagattttacctctttaaaataaggagtaaaattataagtgccgtcgggttggcgcgcactggcatatagtacatcgtgcagcaaaatatctccgtttgcaaccacacgtgctgtttttacagtattattatttgcaaccttttgccctttagattgtgctaaatccttagataaccccaaaataaaaatagcaataataacggctacacaaaaaataagtgttttctgataagggattcttgccatacttgcctcctttattcgtattatagcattttttataaccttatgatagcgcaatcattttaataaaaaactacagagtaaatctgtagtttaaaaattcattataataaatcgtcaatcaagtcatcaacatcatcactatctgcttgaggttgaatagtagttaccataatccctgcaactgccctctctacaagaccttctacatccatacgtttctcatactgttctgtattcttaattttagggttagtttttgggcgatctggtgcaaaaatcgtacagcaatcctcaaatggttgaattgaaatatcaaaagtatctattttttgagcaatatcaataatttctagcttatccatcgtgaccacaggacgaataatcggtgttgcagtgacagcattaatagcttgcatactttctaacgtttggcttgccacctgtcctaaactttcaccgttaataataacaagaccatttcggtcctcacgaatacgatctgtaatacgcatcataaacctacgtgttaacgtcatcaagtaggcttcgggagcttttgccttaatttcctcttgaatttctgtgaatggaacttcaataaattgaatattaccaccaaattttgtcaatttacgtgttaaatcatgtgcttttttcaatgcacctgggctagtataaggaggacttgcaaaatggactgcttctatatctacaccacgttttaacgctaggtaacctgctaccggagaatcaatcccaccagacaacatcagcatcccttttccagatgttcctactggtaatcctcctgcacccctaatatcctcatatgaaatataagcagcctcatctcgtatctcgactttaagattgatatctggttgcttcatctgagccttaatatttggcaagactgaaaaaacagcatctcctaaagtatgatttagagcacggctatccaattcaaatgagtggtcactacgttttgcggtaattttaaaagtcatcccatctttataaacggaagtcataatttcctggacagcttttaccaatgtatcaacatttttttctactttaaaagatggagaaaaagcttggataccaaaaatctcttttaaggactctgcaacttcatgataatctgtaccattgagatatacatgtcctctatcacgatctgtttttactgaaacatctggataaatggagagtacatgctccatattattttttaacttattgatgaagcgcatacggtttttcttcttagtagagagttctccataacgaatcataatttctgaatactgcatcttatcctctaactttcttagttttttcataaacttgtttaaaaatagttaaaaattgctctacttgtcccatatcattatcatcatctaagctgatacgtacagcagtttgggctaacttagttgaaattcccattgctataagagttcctgctggtttacctgctttagaagagcaagcgctagttgtcgagataaaaatatcatgtccctcaaaggcatggacaagaacttctcctcggacacccttgataccaaacgtgataatgttaggtgaaaaatcttccttacccgaaaataacgtaatatcctcatatttggctaattcatcatgaataatggttttcattttacttattttaggaatagctactacttccttgtccataaccattcgtaaagctttagcagtagctgcaatccctgcgacattctcagtagttgaacgtaaatcagtttcttgtccaccacctgttagtaatggtgaaatacgttttccttctttaatatatagaaagccaaccccacgaacgccgtgaaatttatgactagaaaaagatgcaaaatcaactcgctcagtcaaataatctttagtcggtatcttacctattgcttgaacagcatcaacatgaaacgatatagtaggtttatctgacaacaagtctgaaatagcttttattggctgaatagaaccaatttcattgtttattgccataattgaaataagaatcgtttctggtttaattaatttgaccagtgcttctacgtctacaaatcctttatcatctactggcgcataatcaatctcaaacccatactctccaagccatttagcagactctttaacagctgggtgttcgatatcagaaacaataatatgatttccaaaatgttgtttctcaaacgcaagacccttaataacccaattatcggcctctgtaccaccagaggtaaagaaaatttcatttgctttaagctcaagtaaactagcaatttgtttacggctagcctctaaaatccgagaagatgttgttcctagctcatgtaaacttgaggggtttccatagattttactagctacttcttgataagtccttaaaacttctggatagggaatagtagttgccgaattatcaaaataaatcataaatctgtccttctaaagtcaatcagtgttattatagcataattttcctactatttatattagtttgtgaacatcccaaaacaatatttatgataattctcataatttatcacaaaactcactacctattacactaacatagcttaataacctaggttgcttatttaaatgttttaaattattttttctttagctttttttaggataaaatcatataatagttgatgtacatttaaggagggcgtcatgtcaaaaggatattcaagacaacagaaaaagtctactaagactaatactgattcaactcaatcacccgctaagcatataaaaacaggtttttctgcacttcaaaaaacaattgcattagtcggtagtgttttaagtattattgttgcctctattactattactaatgcgattaataatcacaaagactctagtaagactgattcttctacttcaaaaaccgtcattataagagaaagtggacaaaattctagtaaccaagtttctactgaaaaagatgagacaagggcatcatccagccaaacactagaaaattcctctgctagtagtactccgagtagcagttcaaattctgctgccaataacgatcaaacatcatctagtactaacaatgatcaaacaaataatactactaccgatacctcaactattgaaaatacaacaacaccttaaaaaagctaggttccctagctttttttgtattctttgatagcgttagcgcattgtaacaaattcctcagatccagttgggtgaatagcaacagtatcatcaaagtctgctttagtagcccccattttgatagcaactgaaaaaccttgaatcatttcatcaataccataaccaacaccatgaagcccaataactttttcctcttttcctagggttatgagcttcatcttaactgcttggcgattagtggtaacagccgtatacatagaggtaaaagttgatgtatagactttgatattatcttctccaaattgctcgatagctgctgcttctgaaagtcctaccgtcccaattacagggtgagtaaaaataactgaaggtacattatggtaatctaatttttcgttatctttatgattaaaaagtctttctgataagcgacgacctgctgcaattgctaccggtgtcaaggcaattttcccattaacatctccaatagcatacacgccatctacagaagtattctcaaattcatctgctttgatataacctttatcatttaaaacaatatcggtattttcaagtcccatgtctacatttggtccacggccgatagcccatattacacgatcaacgacaagcgttttcccattttcagcttcaaaaatcaacttgccaccttcatcgcgtttaagagatttaggtacatggttagcatgtaaagagatacctgatttctccatttcagccataacctcacttgttaccatgtcatcaaatccgcgtagaatatggtcttttctaaatgcaagatgggtttcaacgcctaattcattaaccactccagcaagttccgccgcgatatagcccgccccaacaatcaatatagaatctggtaaggtctcccatccaaaaaaatcatcagaagtctcaccaagttcacttccaataatatcagggtaaagagggtgtccacctgttgcaatagtaatgtgaggagctttatattgctgaccattcacttcaatagtatggttatcaataaaacgagcaaatccatcaatcttttcgactccattacgctcaaaattagcggcatacgactgtctagaccgctgcacgtaagcatcgcgattagcttttagagtagtaaaatcaaaattaagattattgacttcaaaaccataacctgaactatacttatggagtgtctcagaaacttgtgcaccataccacatgattttcttcggtacacaacctaagttaacacaagttccacctacttgtccaccttcaattaacaggacttttgctccatacatggctgccctattagcggtaccactgcctgcactacctccaccaataacgatataatcatattgttttgacattactctctccttgaatcattgatacctatactctatcacaaagtgtttacagtcacaattttctgctacgtagaatgcaaaaccaatataatgtgggcaatactagttcagtagactatcataaattgaaatattataaaagagaaaactcaaggagctctctcttttataatattacatcaagtcctgcatgggtgcaaagacaattttttcgatatcagacatatagacagacaaccgttgttgttggtcaaaataaacttttaaaaggtcattggattcaattttttccccaagtttagacatttcatcttgttcttcttgacttggcatttggccagattgcatcatttcttgaacttttgattgggtagccaaaaagtcttgccaaagcacttgtgcatccgcatcactttcaatagctgattttgcagttaaaactgcttggtattctggtaaagcacgaacagcacgttctaattcatttgctaaatcatatacattagccataagttactcctttttctacttgaacttaccactattttagacttttatacctttttttgcaattgaatactactagttttcatttaaaaatgatcaacataattgcgatatagttttacagcttcttttagttcatacatgttgtctgaagaaaatttttctagcacttctgtcaccaggacggtggctactacagcttccataacgacacctgcagccggaagtgccgtgggatcagaacgttccactgtagctctataaggctcgtgagtatcaatatcaactgacattagtggcttgtaaagcgtaggaattggtttcattactcccctaacgataataggctctccattagtcataccgccttcaaaaccgcctaaattatttgactgacgtatataaccttggtcctttgtccatgatatggagtccattacttgacttccttttaaaaaccctgacttaaaacctagaccaaattcaacacctttaaaagcattgatagatacaactgcttgcgctatcttagcatctaactttctatcccagtgtacataagagcctaaaccaacgggaactcctccaacgatagtttcaaccactcctccgatagtatctccagcctttttcacactgtcaatataatccttgatttcttgttcgaaggatggattgacgatagctacttgcgattgactagataacactttgatttgttgaactgttagcttatcagggacagtaatctccttgccaccaaaaactacaatatggttggcaatttcgataccaatttctttcaagatacgtttagcaatcgcaccaatagctactcgcattgtggtctcacgagccgaagaacgctctaaagcatttctcaaatcatcgaaacggtatttaattccacctactaaatctgcgtgcccaggtctaggatgcttaatacgacgtttttgctttaggcgctcttcaatgtcttcgactgacatgatgtccagccatttgctatgatccttattagttactgtcagtgtaataggtgaacccaaggtttttccatggcgcacaccagaactaatgatcacttgatcagtttcaattttcattcgattcccacgaccataaccaccttggcggcgttttaaatcttcattaatatctttagcagataatttcagtcccgcaggaatcccttcgataatagctgttaaactaggtccatgtgactcaccagcagttaaatatctcatctatttctccaaataatctctcatttcttctaaaggtatttggtggactgttgcactacctaattgaggcagtataacaattttaataaattgtccacttgcttttttatcatgactcaatatgtcaaataagacgtccttatcccattccgcatagtggaccggaaggccaaattttaaacacatattataaatatcttgactgatacctcttggcataagatttttacgctcagccacacgagaaagctggatcattccaattgcaacagcttctccatgcattatttctccatagccagcatgtacttcgatagcatgaccgatagtgtggccaaaattcaaatgcatccttaaccctttatcatattgatcagctaaaacatgctttcgtttaacttgacaagagtgataaataatagctaatgcattatcaaggatactatcaatagtcccatccatctcttctaaaatatgccagagttttatatcatcaatcaagccatatttgatgacttctcccataccttcaactaattcacgattgcccaatgtttttagagtaacaggatctatcagtacaccatcaggttgtgcaaaagtacctaccatatttttagcgaatgaagtgttgactcctgtttttccgccaatggaagaatcaacctgtgctgttaaactagttggaatttgaagaaaatggattccccgcatataagtagaagcaacaaacgctgctaaatctccgacgacgcctccaccaagtgcaatgatcccatcgcttctggtcatatgatgctttgctaaaaaagcataaatacgattagcaacttccaaagttttactagcttcacccgcagcaaaactaaaaacatgtactgtaaaaccttgtttttttaactggttgacaagcgactccccgtataatatttctacgttactatctgtgataatagttatcatttgtttctgccataaatgtgatacccagtcaccagcctcagaaaaacatccttcttcaattttaatatgataagggtgattcggtaagtcaacttcaacctgcattctaatgtcctctcatgtttgttttaataagacaaaaaccctaagcaattgctagggatctcatcagtatatttaacattttgttatctcgtatcagtcagcgtcaagcaatgctttgacacgcttcatctctgaaatagtaatttgtccgggtgcgatagatgaatctaaatatgcaaatgtccaactagatccagttacatcaccagcaaaacgagaaatacgtccaattttactcatagataccgtcgcataaacttgatcaggattaatagtcttgaaaccgcgagtgtaattcataacgtctaagacatcttgttcattctttggcattactgcgattttcacaactcgtggtgctagggctgttaattctgaaaatatctccataatattctccggtgtctcttgaaaattgtgataagacaggactaaatttggaaattctagcatttcttgaaaaacttctttatgtgaaaaatactcaaaatcaatataatctggattgtagatagaattaattttctggattaactcaacatactcagcatcagataagacaatattaccaccttcacgcgttgtacgaagagtaaaaataatttcatgacctgcgaatttctcaaaaatagctggagctacattaataatgtcatcctttggtaaggcatcagctcgccattcaataatatcaacactatcaaattttgataaatctatttcttgagcctcttcaagactgcgaggcattactggtactactattttcattattttacctttattgtaaatacttttaaataattactttgttggtccttatcatttatagtgaaatcttcaggcaactgctgtaagctaatgtaattatgtgaagctttaccaaaccccttttccaattgtttcttaaattgtgatacggttagattagctgcgttagttgatgcaatgatagttccaccaggggttaaaatatctaaagcttgttcaattaatttatagtaatctttagtaaccgaaaaagtttgttttttatttcgagcaaaacttggtggatcaataacaatcacatcatatgatagatgttttcttttggcatacttataatattcaaaaacatccataacgataaatcgatggttatctgtgacaatctgattagcatcaaagtgtgcttttgaaagttcacgcgagcgttttgctaaatcaacagaagttgtctctaatgctcctccaacagctgcagctacagaaaaagccgcagtgtatgaaaacatatttagaacttttttaccttctgatagattagttgctaaggcttttctgacatcatgttggtcaaggaaaatacctgtcattaatccatcattcaaaaagacactatatttgatattattttctaaaatcaaaaatgattcaggagcctcttgaccgtacaaatgagcactttcaaagtctaaacctttgaaacgaattttttcatatgcccctttaatattaggatagacctgcttaaaggctgcaacaatcatttgtcgattagtataaacaaattcattgtaccacgaaaaaagagcatagtcactataaaaatctatagttaggccaccaaagttatctccatcctgattaaacaagcggtaggctgttgtttggctagatttttcaaatttttgacgcttctctctagatttttcgaatagcgatacaaagtaatcatggttaaaatcaaaaacttgtcttgatagtaaccaaccaatacctttattttgtggtgaaagataggccatccctaagaattgatttgactgtgaaaaaagttgaaccaactggttaactaaactggtatcaaaatcttttttttccagtaactgagcacctgatttgatttttctttcaacgacagaattcactttaagtttattcataaacagtattataacaaatttttatcttttttcatactgaattcgacctttctttaccgtatgttacaaaattttatgttataatttaatctgagattttatctttaggaaaaaaattaaaggaagttcctactgtgaaaaaaattaaagattttgctagccgtgcgatcaatacacgactcggctttattttattgttagtagttatatattggttaaagacaatttgggcttaccatactgattttaatttaggtttagaaaattcctatcagttgtttttgaccattataaaccccatccccttaggactcttaatcataggtttggccttatatgttaagcgaaccaaagctttttatattaccgcttttatcacctatgctatcgtaaatatccttctaattgcaaacgcaatctactatagagagttttccgatttcattacagttagcgccgtcttggctagtagtaaaacttcggctggccttggagactctgctcttaatctattgagaatttgggatcttgtctacgttttcgatttcattatccttattttcttatttgcaaccaagaaaatccacttagatgatcgtccatttaataaacgtgctagtttttctatcacagctttgtctggtttactcttttcaattaacttattcttagctgaaattgatcgtccagaactactaagtcgtggtttttcaaacacctatattgttaaagctcttggcttgccatcattttcgatttatagtggtaatcaaacttatcaagcacagaaagaaagaaatggtgccactgcacaagaattagcgactgccaaaaaatatgtagcagagcattatgccaaacccaatccagaatattatggtatcggaaaagggcgaaacgttatcatgattcatttggagagttttcaacaattcttgattgactataaattaaatattgatggtaaagaacatgtggttactccatttattaacagcctttatcattcgaaagagactgtctccttctctaacttcttccatcaagtcaaagctggtaagacatccgatgctgagacactcatggaaaactcactttttggtctaagtagtggttcattcatggttaattatggtggtgaaaatacacaatttgctgctccacatatcttagctcaaaatggaggttacagtagtgcggtcttccacggaaacgtcggaacattttggaatagaaataatgcttacaaacagtggggttatgactacttctttgactctagctacttctcaaaacaaaccaaagataattcattccaatacggtttgaatgataaatatatgtttgctgactctatcaaatatctagagcacatgcaacaaccattttatactaaatttattacagtaagtaaccattacccttacacaagtttgaagggagagtctgacgaagagggattcccacttgcaaagactaacgatgaaacgattaacggttattttgccacagcaaactaccttgatacagctcttaaatcattttttgaatatctaaaagctgctggtgtgtatgataattctattattgtaatgtatggggatcactacggtatttctaatacacgcaatcctagcttagctgaattattaggtaaagaccctgaaacatggtctgaatacgacaacgctatgttacaacgtgttccatatatgattcacattcctggctattcaaaaggttttatcagtaatacatacggtggtgaggtagataatttaccaactttacttcatattctaggaatagatacgtctaaatatactcagttaggacaagacttattatctaaagataataaacaaatggtcgctatgagaacaactggtcagtatattactcctaaatacactaactatagtggacatctctattacactgattcaggacaagaaatcacaaatcctgatgaaacaactaaagctgaaataaaagctattcgagatgctactaataaacaattatctacaagtgattcgattcaaactggagatttactacgatttgatgaaaacaatggtttgaaaactgtagaagttgaaaaattcaattacacacattctcttaaagcactcaaagctaaagaacgtaaattgaaagatcgttcaacaagcatatacagcaaacataacaacaaatcaacagttgatctcttccatgctccaagttacttggaattgcaagatcctaataagacacataaaacatctaaaaaataatccttgccatttaaagtttaatccacacctcaatccaacgattgaggtgctttttatacggaataatactataaaacaataaaaatcaaaaaggaaaattataacaataataaatatatcgaaataaaacaaaaaagtttcattctacatatatagaacgaaacttttcactaaaattataatataggtactttctttctagtaattaaaaaaagttaggcaaacccaacttttttaattcttatttaccaagtttagctttagctgcatctgcaagagctgtgaaagctgctgcatcgttaactgctaaatcagcaagcattttacggttaacttcgatttcagctaatttcaaaccgtgcatcaattgtgaatatgataaaccattcatacgagcagccgcattgatacgagtgatccataatttacggaagtcacgttttttctgacgacggtcacggtatgcatagtagtaagaattcattacttgttcttttgcagtacggaacaagatatgttttgcaccatagtaacctttagctaatttaagtacgcgtttacgacgtttacgtgaaacaactccacctttaacacgagccatttatatttcctccaaataatcctttataatatgtagtaaatgtttacagagaccttattatttaaggcgagtaagcattgctttaatacgtttgaaatctcctgatgaaaccatagtagctttacgaagatgacgacgttgttttttagttttaccgtggaaacggtgtgaagtaaacgcgcggaagcgtttcaatccacctgaacctgtgcgtttaaagcgtttagctgatgcgcggtgtgttttttgttttggcattttaaattctcctcttaaataatactataaagtcgacaattatttcttgtctggaattggtgcaagctgcataaacatttggcgaccatccatcttagctctttgctcaataatagcgatatcttgtgtcgcttcagcaaattccgccaatacctttgctccaatttctttatgagtaatcatacgtcctttgaatcggatagaaactttaactttgttacctttttcaaggaacttacgaccgttacgaagttttgtttcaaaatcccctttatcaataactgggctaagacgaacttccttaacagtaacaacgctttgttttttacgttgttctttttgtttcttttgatactcaaatttgaacttaccatagtccataattttcgcaacaggtggtgtagcttgtggctgaattaaaactaaatcaacattagcatcatctgcaattgcttgagcttcagacaatggtttaatacctaattgttcaccctcgagaccaaccagacgaacttcacgaacgcgaatttcatcgttaatgaatagatcttttttagctatgatcttcacctctttatttttttagagaaaaacgaaagcggacttgataaatcaagcccgcacatataatcttcctagatggaatcttgacatgttgggccagacaacctaagtcgcaaggcgagaagttctcacttctgcttttctcattgcaactagtatatcatgactaattcttcatgtcaattattttttctgctttttcttgaataaaagttacaacaccttcaattgatactcctgtagtatcaaattcaatagcatcttctgctgcctttaatggtgaaacttctcgatggctatctttataatcacgagcagcaatttctgatttcagtgtttcaaaatcactctcaatgcctttttcttgattttctttaaagcgacgctcagctctttcatcaacagaagccactaaaaaaatcttcaattctgcatctggcaaaacaactgttcctatgtcacgaccatccattataatagcaccatctttggctatacgacgctgctggtttactaactcttctcgaatctctgggatagcagaaacccacgagacattgttagtaacatcgttttgacggatagctaaagtaacttcttctgtgccaagaaagactgtctggctgccatcttctgctttaccaaaagaaattggtctttcagctaggagtcctagaattttcgaaacatcttgtgcttcatatccatgctgtaaagccagataagtagcacaacgatacatagcacctgtatcaaggtaagtgtaattcaaatttttagcaataatcttagcgacagtactttttccacttgatgctggtccatcaatagcaatattaattgagttcataatcctccccttaatttacaaccacaggatcgcctggattagcataccaataccctgaggtcatatgactgggattaagttcttgtaaacgagcaactgagatacctgcacgagcagctatggaggctgctccctcacctggttgaactacgattgttccaccgtttactgaagatgatgtcgatgtctcactcgaacttgctacagtactagaagatgttgttgatttatcactagttttagtttttgatgatgacgttgttttcttacttgtagatgcttttttcgttttagaactattaactttttggcttgaagcaccataaaaaccagaagtttcttttgctctgtcttctcctctatttgaagtataaaatactataaataaaatagcaacgacaataacaaagaatgcactcaagaaagcggtaatccaaggagtacttgacaccacacctctactcgttcttgtaattttgtcttttctatgactattgttttccacaacttttttttcccatggttttttcgccatgacttcccccttgttaatcgtatcaataagtattacaataatactatgaaagttgcactaattccagaaaaatgtattgcctgcgggctttgccaaacatattcaaatatttttgattatcaagatgatggtatcgttaaattttccgatacagataacctagaaaaagaaattccaagttctgatcaagatactgttttagcagttaaatcatgtcccaccaaagctcttacgattttgtaagagcttttttatcgtagcgataacattcaaaataatccattttaatcaaattatcgagaagctccacttctcccttaaatgtaggttcaatagctagtgcatctaaaaaatattttttaggccattttcgcatgtaaaaaatacgctcatggttattattaaatttgatagtaacacttgatttagtgacctcaattttagcaatatcttcaattggaaacttagttcgtcttaaaaagttaaaagatacaatcctaagatatccgtcttcttcaataacaaaatagcgatgaaatccaatgcccactaaaacaataaagatggcaaatagaacaaatacctgactcggaatctcagttctttcatatagcagagataaaccaataaaaattggtgcaatggctattgaccaataaataatagcccaagaaagttcaggttgccagtgataacgtatcttcccaaataattttatcatttaaccactccaatctgatatttctttactaatccttagcaacgatgcctaaaataacatcaactgctttttccattgtttgtagactaacgaattcaaagcgtccatgcatgttttcaccacctgcaaaaagattaggagtagggattcccataaaggaaattttagagccatctgtaccaccacgaatcggttctatgattggcttgatgtctaactcttccattacttctttagcaatgttgataggtgtcatgtctttttcaataactttcttcatgttgtaatattgatcgtatagtttaacctttacacgttcagattgtaatgcttcattcatattatcagcgatatcttgagccaagtgcttacgctttaagaaatcaacttcctcaaaatctcgaatgatatatgaacttttagcttgatcaactgttccacttaaatcatataagtgataaaatccttgatagccatctgtttgttcaggacgttcattttctggtaattgactatgaaaatccatagcaagctgtaaagcattaatcatttgattttttgcagttccagggtgaacgtttcgtccttcaaatgtaagctccaaaccagctgcactaaaggtttcatactgtaattctcctagtggtccaccatccactgtataggcaaaatcaacatcaaaatctttaacatcaaatttatctgcacctataccaatttcttcgtctggtccaaagccaactctaatttcacaatgctcaatttctggatgcgaagccaaatattccatagctgtcatgatttctgctataccagacttatcgtctgctcccagtaaggttttaccatctgttgtaatcagtgtttgcccatggtaattatttaaatttggaaaatcttttggacttaaaatgtaacctgagtctccaagttcaatatctccacctttatagtcaacaatttgtggagtaatattttcagcattgaaatcagctgtatccatatgggatataaaacctattttatggcgtaagcggtcgcttgtagcaggtaaggttccaaccaaatacccattagaaggtaaataatgaacatcttttaaaccaattgcttccatttctggttttaaaactgttaaagcaaagtcaacttgactttgagttgttggcgtttgtgtactattaggattacttcttgtatttattttgacgtatgttaaaaatcgttctaaaagcttttcgtaagacatctttcacctcatatttctccatttaattataacataaaaataagctcactatattgtgactaccttaaaatttcacaaataattttggtcgtcaaaaaactaggttaaacaattctgtctaacctagtttttcattagttaaggtgcaactttcggcgtaagtcttgagcacgactaccaatcattttatcaagtagatgggtggccagtgccataaagccatatacccctaaacctattgcaccgataacgataatgtaaactagacttaccagtctactatcgggtacaataaccagattcattaaccatattatcatagaaataataaagctcatcaatagcgttagaataaggactaaagcacttgtacgacgaatagcttggcgtttaaatcctgtaatttcatgtattttcaaatacataagaattactgggatacaaagagctactgtcgttgagaaaagtggtccataggcatggaaaaggaaaatggagggaagttgtaaaataacttttgccaccagaccatataggaagtaaataatagctttacgattttcaaacaatgcttgtagcattggtgctaaaacagtataaatagataaaataattgtttgaataagagatatgacaaaaagtcctaaagcttgtccctgcggtaacccataaaagactgtatacaaaggttttgctaaaataacggatcctgcaacagctggcagtaaaaacattagtaacatttgtagattattaacaaccaaacgagcggcggcttttttatcattcttaacaaaattctctgttaacaatggaataccaactccagcaattgcggtagcaacagcaattagaatcatcgtaactttaccagggttgcttgaaaagtaagcaaacataacccgtaattcttcacttgaataattcgtaaagagcgccatcgtattcccaaatgaaaactgatcaatcagtttgaaaatttgaattgctgcaccagtaataataaaagggattgcttccttaatagtctcaattaggatttctttagtatctaatttaatgtgctttggagttttaccaatcaaggcagatagcatattataacgccataagaaataaagcagcacagctatactagcaaacataccgacaaaggcggcgaatgttgactgtgtcacagcggcaatataatctcctgatcctagacgcataatatagaaagcagttaataacatccatatgacacgtataatctgctcagcgacttgactaatggcatacggttttaaattattaaaaccttgaaaaaaaccacgtaaaacactcattgaaggaaaaactaaaacagctagagttagactacgcaatattggaacgagttcttgccctcctttactaagtgaagcaaatagaggtgaaccaatatacataattaatgcaaaaattccacctaaaatcagcataaactgcaagattttccgaaccagataaatgctcatctcttctttacctaaagtgttatacttagatacctgttttgcaactgctactggaattccaacagttgatatcaaaagaaataaagcatagatttcatatcccatcccaaataaagcatttgcttcggcagcatgctttcccatccaagcataccaagggataatatagatggctcccagcaagcgactaatgaaattccctgctgttaaccaagccgtccctttgaccatttgttcttgctgactaacttttgttgttttttgtgacatggtaaactttctattttcaatattatttagcatttaaaagacaaaaatctcagaaatatcactttattataaacttttaccttagacttgtaaaacgagaacataaagtctaaaataaggagtatgattacaatagataaaattttagaaattttaaaaaatgaccataatttcagagagattttgtttcatgagcattattattataactggacacaaaatgtaacttttaatgccttatcatatgatagtcgtcaaatttcatctgatactttatttttcgctaagggtgctacttttaaaaaagaatatctagattctgcaatcacagcaggcctttctttttacgtttctgagacagattacggcgccgatattccagtgatattagtcaatgatatcaaaaaagccatgagtttgatatctatgtctttctataataacccacaaaacaaacttaaacttctagcttttactggaacaaaaggaaaaacaactgcggcttactttgcttatcatatgttaaaagtaaaccatcgtcctgctatgctctcaactatgaacacaacattagatggtaaatctttctttaaatcacatctcacaacccccgagagtcttgatttatttcggatgatggctacagccgttgagaatcaaatgacacacttaattatggaagtatcaagccaagcatacctaaccaaacgtgtttatggtttaacctttgacgttggcgttttcttaaatattagtcccgatcatattggtcctatcgagcaccctacattcgaagattattttttccacaaacggctcttgatggagaatagcaatgctgttgttgtaaatagtcagatggatcattttaatattgtcaaagaacaggtcgaatatattcctcatgatttctatggagattattctgaaaatgttatcacagaatcaaaggccttttctttccatgtcaaaggaaagttggagaacacctacgatatcaagctgattggaaaattcaatcaagaaaatgctatcgcagctggacttgcttgtctccgacttggtgtttcaattgaagatataaaaaacggaattgcacaaactaccgtccctggccgcatggaagtcctaacacaaaccaacggcgcaaagattttcgttgactatgcccacaacggagacagtttgaagaaattattagctgttgttgaggaacaccaaaaaggggatattatattagtactcggagctcctggtaataaaggtcaaagccgtcgtaaagactttggagatgtcattaatcaacatcctaatctacaagtgatactcactgcagatgatcctaattttgaagatcccttagttatctcacaagaaatagcaagccatattaatcgtccggttactatcatcattgatcgagaagaagcaattgctaatgccagtactcttactaattgcaaactagatgcaattattatcgctggtaaaggagcagatgcttatcaaattatcaaaggaaatcgtgacaattactctggagatttagaagttgcgaaaaaataccttaaacgataaaaaaagctaaacaataatgattattgatactattttgaatcattccaaataattatcattttgttcacatttttcttaattaatgctaaaaaaggcttttgtaagtcttttttctatgttataatgaacttaattttttgctagaaaggttctctatgtctcacataaaagcagaaaacattatcgtatcttacgatcagaaagaaatcatcaataatctttccctcagtatacttaaccaaaaaataacaacgattattggtgccaatggatgtggaaagtctactcttttgaaggctctcacacgcatccataaaataaaagatggtactatcactattgatggtcatgatattgcacatttacccacaaaggaaattgctaagaagattgcacttctcccacaggtgttagaagcaactgaagggataacagtttatgaactaatatcttatggacggttcccacaccaaaaataccttggcaatttgacaaatgacgatcgcagtaaaatccattgggcgatggaaatgactaacgtagcgcaatttgctaatagagatgttgatgacctttcaggaggtcagaggcaaaaagtatggattgctatggctttagcacaagatacagatactatctttttagacgaacctacaacttatcttgacatgaatcatcaattagaagtcttagaattgctcaaaaaacttaatgacgaaacgcaaaaaacaattattatggtcctacacgacctaaacctgtctgcgcgctattctgattatctagttgcaatgaaaaccggtaaaattatctatgaaggtagtcctagtcagatcatgactaaagatattatcaaagatatttttaagattgatgctcatatcattcaggaccctattagtaaacaacctgttttgttatcttatcaattatcaactgatcaaaattaatattatttaggagatgttatcttatgaaaaaaattggaattattgtcctcacactactgaccttctttttggtatcttgcggacaacaaactaaacaagaaagcactaaaacaactatttctaaaatgcctaaaattgaaggcttcacctattatggaaaaattcctgaaaatccgaaaaaagtaattaattttacatattcttacactgggtatttattaaaactaggtgttaatgtttcaagttacagtttagacttagaaaaagatagccccgtttttggtaaacaactgaaagaagctaaaaaattaactgctgatgatacagaagctattgccgcacaaaaacctgatttaatcatggttttcgatcaagatccaaacatcaatactctgaaaaaaattgcaccaactttagttattaaatatggtgcacaaaattatttagatatgatgccagccttggggaaagtattcggtaaagaaaaagaagctaatcagtgggttagccaatggaaaactaaaactctcgctgtcaaaaaagatttacaccatatcttaaagcctaacactacttttactattatggatttttatgataaaaatatctatttatatggtaataattttggacgcggtggagaactaatctatgattcactaggttatgctgccccagaaaaagtcaaaaaagatgtctttaaaaaagggtggtttaccgtttcgcaagaagcaatcggtgattacgttggagattatgcccttgttaatataaacaaaacgactaaaaaagcagcttcatcacttaaagaaagtgatgtctggaagaatttaccagctgtcaaaaaagggcacatcatagaaagtaactacgacgtgttttatttctctgaccctctatctttagaagctcaattaaaatcatttacaaaggctatcaaagaaaatacaaattaaaagaaagctcctcttatgtttaaagcttcaaaaaaactcgttcaaaaaaataagtcaaatcatttttggcttgtttttttcataacacttatactatttcttattggttgttacgccagcttacgatttggtgctatcaatttcaagactagtgatttaataactgttttaaaaaatcccttaaaaaactctaatgctcaggatgttatttttgacattagactaccacgcataattgcagctatcttagtaggtgcagctatgtcacaagcaggtgctattatgcagggagtcactcgaaacgccattgctgatcctggactactaggtattaacgccggagctgggttagcccttgttgtagcatatgcttttttagggagcatgcactatagtacgattctcatagtctgcttactagggtctgtcatttcttgtcttttagtcttcacactctcttatacaaagcaaaagggttaccaccaactacgactcattttagccggagcgatgatctccacactttttacgtctgttggacaagtggttacattatactttaaactcaatcgaactgttatcggttggcaagcaggtggtttatcccaaattaactggaaaatgctaatcataatagcacctatcattattttaggtttacttatttcacaactcctagcacatcaattaactatcttgagccttaatgaatctgtggccaaagcattgggacaaaaaactcaattaatgactgcgtttctattacttattgttttgtttttatcagcttcatcagtcgctttgataggaaccgtttctttcattggattgattattccacattttattaagctttttattcccaaagattatcgtctgttattacctttaataggattttcaggggctactttcatgatctgggtagacttatcatctcgtattataaatcccccttcagagacatcaattagttctataatcagtatcgtagggcttccatgtttcctatggttaattagaaaagggaaaaatctatgattcaaaaaaataaagctccttttgttttaatatcatctgtcattatcctactattattaatactagtatcaatttcacttggctatgctaatacttccgttattgacgttttaaaactaataagtggaaaatctgatgatgccttcctttttatcattactaacattcgtttacctcgtattattgtctgtatctttgggggagcttctttaggaattgctgggttgctattacagacgttaaccaaaaatccactagctgattccggtattcttggtatcaatgctggagctggattagtaatcgctctaaccataggaacatttaatgttagcaatccaactatattatactttttacccctatttgctatgtttggagggttggtaactatttttcttatctatcttatgtcatacagaagaaatcacaatattagccctacacgattaatcgtcactggtatcggaatatctacaattatttcaggcgttatgattttgattattagtcagtctaataatcaaaaaatggatatgatcgttgaatggcttagtggaaaaattacaattagttcctggactaccattatcacttttatcccgattctcattttgttatggggattagcatatagtcgcagtcgccaccttaatattatgaacctaaacgagcagactgctctcgctctaggacttcatttaaaaaaggaaagaatatatactttgatgctgacaagtagcctcgctgctattagcgtcgtcttaattggtaatattacttttataggcttactcgctgggcacttaagtagacgactattaggaaataaccataaaattatactacctagctgtcttcttattggtgctattatcctattggtatcagatactataggtcgtctcctcttagttggtacgggtattcccactggattggttgtatcaataattggtgccccctattttctctggttgatgacaaaagttgactaaaaaagactggacaaacttccagtcttttttatgttaagtaaatctttaaagcttcaacatcaagtttagcatttaaacgataggtagtatcttggtttaagctaatatatccaagtaattctaaagcttggataaaaataactgtacgtttttgcttaacactatccttgcgaagaaatttcaatataaagcttgacatatattttaaagcatattccgaattaacatctcctaaaagttgataaagctttttttgttctcttgaaagtggataaccgttagttagtttatagaaataattagaaagagtcaaagtgtttctttcaaaatctgtctcttctacaaataccaagtgattggttgggttatctaaatttgtcacaaattttcgcttctgtaataactgatagatttgactatcagaatctatgaaaaccaaatcatctaatactaatccatctagcgaactcagaaaaggaagattaaggctgtagcgtttattttggcgaaggatatatccatgattaatatattcttctaacaaacggtcaattttagaatagtctgtaaagtgggactttatttttcttagtgttacatcatcatgtatccaaagatagttaataagctccttaaaaaactcttgtctttctaactttcctggattaaacgttaatatcataaaagcgctcctaaatgtatgactaaaaaaacgggacgcagcccgttttacatgattaattaagcattgtagctttctgtcaattgaggaacaacttgttttttgcgtgatactgccccagcaagaaaagcgtggttattttcaagtgtaaattcaaaagctgcttcaactttagccatatttgaaccgagagctaaaatctctgaatttgaattaacaatgtcagtaatcatcaatacaaaatcagaataaccttctgtgacaattgcttcttgaatagcaacttcaatctcttcttgacgtgctaaaatatcgttaatgtccacagtattaacttgtgcaacacgaacagcttctccatttaattcaaatgttttagcatcaatatcaatcaactccgctgcagtcttacttgagaggttagtacctgctttaagcatttctaaaccatattcttctaagtttacacctgcaagctctgctagttcttttgcaactggaatatctgaagcatgagttgttggtgatttcaaaagaagagtatctgaaatcaaacctgataataataaaccagccaactctttgggtactgatactccattttccttaaacatacggtaaacaatcgatgatgctgagccaactggttccaaacgcatatataacggattggcagtctcaaagttagcaacacgatgatgatcaacaacaccataaactgtcacatctttaatatcagaaatagattgttggaattcgttatggtcagttaaaatgactgtctctacaccctctgcttttgcagattctactactcgaggtgcttgaacaccaaaataatctaaaacatatgctgtttcttcatttggagttcctaaagcaacggcctctgtgtcaagcccccaagcttctttagctagatatgcaaaagcaactgatgatccaatagcatctgaatctggattttggtgaccaaagactaaaattttagacatgtttttacctcttcttttatattcaccttattgtagcaaaaattgaataacttagcaaaaaatcttactaggaagccctttgcaactaaaaaagttgaataaaattcaacttaaaactaattttgaatcctttttagatattctgtataggattctgttttcatgatatctttagcgtttttaacacgttctggagttggtggtttcacaccagctaatggatacggaattcctaattcacgccatttgaactctcccatagtatgataaggcaatacttcaaatttatcgacattatcaagtgtttggacaaattcacccaaacgttttaaatggtcatcaatatcagtcaatccaggaactaaaacatgacgaatccataccggagtacctctatcagataaatatctagcaaactgtaaaatatttttgttagactgacgagttacaattttatgttgttctgaatcaatttcttttaagtcaaggagtaccaaatcagtaacatctaacaatttttcaaggatagcatggtattctggtgttgctcgataagcaaaaccacaagtatctagcgtcgtatgaatacctagtttcttagcctcaataaagagggctgtaataaagtcaatttgcagcattgcttcaccacctgaaactgtgatacctccatcttttccccaaaaatgtttataacggagagcttcctttagaacatcctcaacggtacgttcctttgaattgttagtttccatttcccaagtatcaggattatgacagtattgacaacgcattttacatccttgcataaaaatgataaaacgaatacctggcccatccacagagccgaaactttctgtagaatggatcattcctgttacttttttatagtctatttctgccatttcatcaccttgtaaccgtttttatgactttattatatcattttcatgaaaaaaagactaagtaatcttagtctttttcaatattctgttctatatcagacaatagcaccttcaattttgttatacgaccatctttaactttatcattaatcaaagtgatgtgtttatctttgctgtctacttcgtaagctactttttcctcttggtttggaatactacccacaccagttaaataataacccgcaattgtatcaacatcatcactttctaactctgtctcaaaataatcattaaattcattaagcgtcatagttcctagaacaatatagatattctcatcgatttccctgacaaattgttcagctgtatctgtttcatcatcaatttcgccgacaatttcttccaataaatcctctagagttactaaaccagcaacgccaccatattcatctagtaaaatggccatttgattttgagtgttgcgtaatgcttttaaaaggtcatctacaaaaatcgtttctggaacaaaaagaggttcctgaagtatttttcgcaagtcgatagtatcaaaaccagttttaaagcccgcttccaataagcgcttggtatgtaaaacaccaacaactctatctttatcgtcatcaaaaacagggacacgagaaaagttttgtgataaaattccttcaatatttgattgtgcatcattgttgatgtcaatcatgaaagcatcagtgcgcggaaccataacttcacgcgccatcatttcatctagcgagaaaatcccttgcagcatctcaatttcttcagcttccaaagtttcttcactattcgtcaacatatattcaatttcatcacgtgtcatcttctcgtcagcatcatcaaaagtcatcggagtgattctactcaataagttagttgaagctgagagcaaccatacaaaggggcttacgattttccctagaaagataataatgggagctgaaacaattgctagacgatctttcaaattcatagcaatacgcttaggatataattctcctagaacaatagagacatatgttaaaaagattagcgcaataatactccctgctgtacgggctgttgctgaatttcctagccaccctgaaatcacatgtcctagtgaggcagataaactagccccttgcaaaaggctaataaaagtaataccaacttgaattgttgataaaaaattattgggattttcaagaacgtccaaaagacgtcgataccttttgtccccttcttcagctttctgttctactttagagcggtttagcgatactaaagccatttcagatgctgaaaagaaggcgttaaatagggttaatattaataaaataacaaattgtagtaacaaactctgactgccagggtcttgcatggaaaattactcctaaataaaaattatttgaatttagctgatagcgattaactctaccaactgttcttctattagataatgctatcattatatcatataatagcactgagcgcatagtcgataatattgtttatggcattttatagaaattatcattttagctaattgcctaaagatagttacacctcattttcatatgattgtaacttttctaccataattaaaaagggaggcgtattaacttgattgagtggttgataaagcattgtagcgaaattattctgtggtaattgttccacgaatgctatcaccgcatctttctcactttttccaccatcatgaccataataaaccataagtgatagacgtccacctacttctaaaatgtctaaaacgtttttgattgccttgatagttgtgtgtggttttgtaataactgttttatccgctgagggtaagtatcccagattaaatatagccgctcttaaaggtgtatgaacatattgttccaaattttcatgcccatccaagataagttcagcgttagagatcccttgctccgtgagctttgctttcgtttttgctattgcttcttcttgaatatcaaatgcataaacttttttagaacttttcgctaaaaaaacagtatcattcccatttcccatagttgcatcaagcgttattgcttctttatcaataacttctgctaaaaaatcatgagaaagatgaattggtcttttaatcatgttttacctcagctttacatccttgatatgactgtcttttctccatttctttgtcaatggcattaagcacttcccatttattaaggctccacatcggtccaattaacatatgacgtggcgcatcaccagtaattcggtgaataacaatatgttttggaataatctccagttggtcacaaataatcgaaatatagtcttcttgacttaacaaacgtaaacgaccttcatggtaatctctctgcattcttgtattagtcataagatgcagaaggtgtaattttataccctgaatatcattatccgtaacacatcgacgaacattttccaccatcatatcatgtgtctcccctggaaggccatttattaggtgagaaacgatttctactttaggagctaattctcgtattctcttaacagtttttttgtaaaggtcatatgaatgtgctctatttattaatgcagaagttgcttcataagttgtctgaaggcctaattctaaagtcacatgcattctttcagaaagttcagcgagatagtatatagtttcatcaggtaagcaatccggccttgttccgatgttgattccgataactcctggctcattaatagcctgttcgtaacgctctttaattatctctaacttagcatgggtattggtaaaattttgaaaatagactaagtatttattaacctcaggccactttctatgcatgaaatcaatttctttatagaattgttcacgaataggagcttctggagcaactatagcatcccctgaaccagaaactgtgcaaaaagtgcaccctcctctagcaactgttccgtctctgttaggacagtcaaaaccagcatctataggtaatttaaatattttttctccaaagagttctcgataataatcattaatcgcacgataacgttttttcataggataattgtatcacaattttaactaaaataacctcactactacaataaaactaaaaaagattggaacgtcagttagtcccaatcttttatttacttcactttctttaaccaatccttggctaaaaagatatacgcagttagattcaaaataccataagcaagtataaaaccagctaaaacatctgtcggaaaatgaacccctaggtaaatacgagataacccaattaaaaaaatgagcaaacccaaagtaccttggcacaacagtttccatatactcttaggcatatagtactgcaataaaataataatactcccaaatatcataaatgttcccatcgagtgcccactgggaaacgaatagccacctgcaaatactaaatgggttaaagttggtcttactctttgaaaaataagttttaaagaaagtatacatataccagagataatagcatttactgcgataaatctagcttgaggataccacttcttaaggtaacagaaagtgacgctcataatcgcaatagctatctggcttacagtattaccaatcacagtgattaacttgaaaaatcttgtagaaagatttggcaactgtcctctaacactttcttgaatagtttggtcaaatgaaattacagtgtcgggccaatatttgatgaccaatcctaaactgaaaaataagataatagcaataaatgcttgaataagtttactattttgacgagataacattagtctttttatatctttctaatattggcaaacaagccacgtaagttagatagaaaacaatcgaaattaaaattccctcaacgatattaaatggaataaccattgttaaaaggtaattgcctacaccaataaatgttctgatatcaaagttagcaaatatagcatacaaaggaatcgcaaagacatagttgagagctaccatagatacggtcaagctaactgtaccaaatagactagctttaataaaatcttttgcactctctctatttttccagaaaatagcgaaacttgctaaaaataaagctagagcaaccatattcatcggtaaaccaataaacgtttctggaccacgattagcaagtataacttttaaaagtgatcttaataagagtacaccataacttgatttcaaatcaaataaaataaaagcaactaacatcggaaggattgaaaaatcaacctttaaaaattctgctcctggtattaatggaaatgaaaccatcatcaatacaaaagataaggcagaaagaatggcgattgtcaccattttacgtgtatttgtcataaaaaaattcctccaatttaaataaattgaaagaagctccaaaggtaagcgtatgtacgcgaaaaaacctttgtcttctcccatccagactttactgtcggttgtggaatctcaccacatcagctttcgctcgcggactgatgcttcacaactgacaaataagttggaagcgattaccgccggtcgggaattacaccctgccctgaagacacctatagcataacaaaaaaaacttgcaattgcaagttttttaattactaattagtagtagtgattaaaaatcatattaataccaaattactatactgtatcgtttctttcagatttgctatttttagtttttcttaaaaagataaacaaaattcccaaaataatacaaccaagaattgtcagtcctccaccaataatcattcctgttttaggaagaaatgattgtggaaaaagcggttgtgatggtttaggatttgttggtggaggagtttctttttcgttttctacctctacttcctgtgttttattagcaactacagcaactacagcatccttcatagatatacggtaaccagttagtgcttttgcttctcgaaaaatatacttaccaggtaataaaccttcaacctcaatttctcccttatcatcagttactaatgaagtaatcccatcttgatcggtcgtaaatcgtccatttttaaagcgaactggctgattctggttatcgtataatacaaatattactccggatagccttttctttatctttccttcttttgtatatttaataagttttaatcggcctgtttcaacttttcgcttaggatttatctgtaattgatttgataacttatcatctggtaattcaatataaaaaggtactattgttgaaacgctttgatcagctttataagcacgaccaaagtacgaaccatttgggagtgctatctttgtctgaccattagtatcagtaggagaagtcaagatactcttatacttctggttcaattcgctatctgtcatttggctcaataaatcaacttttaagttgtcagtcacagtccataaacgataagaaatcccctcctctgtagtatttggctgaagtcctatctgtgtgattgttagttgattaggggtatcagcatttacactggctaccgaaaaaaacgctaattgtaccaatcctaaaaagcaacatagtagaagtcctaaactttttctaatctttttcatttttgatttccctttctctttctctctttaaattttcgttttaaatataatagtaaagcgactaatataagaataactaggattgataagaggaaataaagtttatagtgtgtttgcaattctttcattaaatagttcttttctttaacaggaggtacatacttgattcgatgccctctaactagtaaacgatgtgaattaatcgaataaggtgtacatgttagcaaagtcgcataatccttacctttaacaaccaataatttagaaaaattatctggctttacaacacttatttgatcaaccttataggctaaaacttctttgatattatgaatataaaaaatttttccttttttaagtttatctaaatctgtaaataacttagctttaggtaagccgcgatgagctgtgataacagtatgtgaactttttccaccaattggcaaggaggttccttcaaggtgtcctgctcctttttcaagaacactactggtagtccccgcatagataggtaatttttgcttgatagacggtatatcaatatatccaatcatttcagcaatctcaagcatgtgggcgtattcagcaataccttttttttctttttcagtatagggatctgataggcggcttgggtccagtgttctattataagcttttgctaactcaaatcgtctattaatctctttagtatttaatttttgggtttgattatcaaagttagttacttgattattagctttaatattatagtaccaatttgaaataaaaggatatgaggttatcaaaagaccaactaagaacaatagtatcaagcctacattcatccatcgatttaaaacgaccgatttcttaaggtttttctgaaattttcctcccattatgattcaattccttttctaacacttgctaaacgatttttttgacgttgacgttttattaaccaaagtaaccaagcaataataactaaagatatatagaatagatatctataaatcgtgtttaaatgaccgtcttttattaatttttcatcaataggacctttataagggatacgatgtccccttactaaaagtctgtgtgtattgatcataatcggggtgcaagtcaataaggttgcataatcatgtccaggaacaaccaacaaatctgaaaagttatcgggtgtaacgacttttatctgatctacttgatatgctatcgtttcttttatgttttgaatataaaacttatctcctttttttaactttttaaggttagaaaagagttctttatctggaattcctgaatgcgctgttataacagtatgtgtactattgcccccaattggaagagaggtaccttctaaatgccctgctcctttagatagaacttcttgacttgaacctgcaaatatagggagtttttgacctatcttaggaactgaaattgttccgattttttcacttacctctaacatacgggcgtactctgctacccccttttgaattcgttttttctcataaggatcttcaagatggacattatttaaagaatcattataagcttgtgctagagccatacgtcgattgatttctttctgactaagttttttagcagctctctcaaaatcctgtgtttgattattagattctatcgtatagtaaaaacgtgataccactggatacaataaaatagatagacctattagaaaaagaatgataaaaggaagatttgacttcttctttttttttgtttttttgatgatttttttagtcttcacgtcatctcctagataatggctcttgcttatgatctaagagtacttctactgaaatacccttagatcataagcacagctttaactgcgcttatacatcatcaaagactagccttaagcttcctttgattggcgtcttttcatgataactactgctccaagcataatgcttaaaccaataattgtgaaaagaattgtaccaataccacctgtttgtgggattgttacctttttattttctacacgtgtcgcatctttttggttgctgttagcaacgtagtcaatgttaccacctgttatgtatgacccttgattaactacaaacttaatattacctgccaacttagcaaatcctgctggagcaagtgtttcttcaaggttgtaagtaccgtctgcaagacctgtaacttcaaattgaccttgatcgtttgaagtgtaggtaatggctctagccttatctgttatccactcataagctgtacgagcctcaatgaaggctgcatcgtaatctgcttgtttagttttgataagttcttttgcagtaattcctttttcacctttttggtctgttgcagacaacttgttataagcagcgatagcttcatctaaagctattttcttagcagctaaagttttttgaccttctgattgatctgctttaagagcaaggtatttacctgctgagtttttcacaacgaattgtgcaccagccaaacggtcaccttgttcattagttttgacaaatttcttaccatgagtttcaacttttggttcagttgggttcaatggtgttgggttatcagaatctttggtattggtaatggttactttaccattttctagatttattgcacttccgtaaccagaaacacgttctgagatcatgtatgatttgttttctagaccagtgaatttacccgagaagttaccagatacttcaaatttgataccatttccaaggtcgattgtacctttagatgtttttgtcaatgatactgaagcaacagttttatctttatctttcaatgtgtaaacaacgtttacaccatcaggtgcaattccgtcagaccaagttttagcaactgttacttcaccctttgaaggtgtaacaggaagttcagtcaagtctttacctggtttgttaccatacgacaatttgatatcattggattctggattatcaataattgcttgaccattaacagtagcactataagtcaatgtaaattcaatatcagctgttttagctgctttttccaatttgcccaatccatcagctgtgaattttaatgtgaaaccacgggcatcaatgctaagttcatagtctgtatccttagcaaaagtttctgtagttcctgaagctttaaggctaacagttgaacccattgtcaaaccatttgacattatatctgtccaaaccaagttttcgtatttagaacctttgtgaatttttgttttaacttcataaggaacaactttaccgatttcagcagtagcagttgctttgtcacgtgcataattaccataatttgcgccagctgtcaaaagtctattaacatctgtcaatgctgtcaaatcgtttgttttagcaaagtttttatcaatttctggtttttcttcagtgttctttggataaacatgggcatcagcaacaacaccatcttcatttaccaatggaagagtgatgttaactggaaccgcttttgaagcagccaggagggaaccattattgttgtaagtagattttgatttaacttcaacaattttaaactcgcctttcaatcctttggtgttgaaaacaagtccagtatctccctctggtgtcaatccagacacggcctcatcaatatttactgttatttcaggagtaccatctttattaattaaggctggtgttaatttgttaccttcttttgccttaacatattgcactttaccacttttatcttctttcaaagctaaagcaaagaacgcaccttcgatttctttagatccctcgccaaagtaaccagcaaggtcagaaatagctccacctttgtagtcttttccgttaagacctgtagttcctgggaagttacttttgttaagatttgattcggtttgcaaaatcttgtgcaaagtcactgtattagttgttgcttcatccgcaaacgctggtgcaactgagagcaatgacgttaaagtcagtaacaatgccgagaacattgcaaaatatttgttgattcttttcatttctatctccttcttattttagttaatcaacatgattaataatatgcggattttaatacaccgcagcaccactcccttcaagtcatggaattttagttaattaattaagaatactaaagcgcataatttttaatcttttttgatggacatatcactagatttcttataccttttccaaatataaattccacctgcaatagacatcatagctccacctattaaaatgaaagatagaattcctttcccacctgtcataggaataattccttttggtggaatatgcgtgttggtaattaaatgcttgtcaccttcctcatgatattcagaaatctgtttattaacagctattatattttttatcgatcctttaaccacttcaaaagttaaaattggtttattagtaattttttgataatcctccggcgaaactgcttctattaactgatatttgccatctttcaaatctttgtaagaaattttgccgttttctcccgtcactacttttgaattattattttttattggtaaataaagtttataatcttcattaaattcttgaagttcaaacgtagctcctttgagaagcaacttattattatctttatcaacttttataaattcaatttcacctaacttcttctcgtttttaatcgttattgtaggatattctctcacatcacgaattttagggattggaaaatctctaagtgtattaggatcctctgacttaggattcaatgttgttctaccattagtgtcatagaatttgttacttataaaactgtcatctagtttcacatcatatgtgagtgttactttttgaccttctcctaaattcaaacctctaacatagagtttatttccgatgtattctaatttaacccccttaagtattccaccatcattattaggcccaccagttgcaataccatccttcattacacttccatcatttccctgtaaagtataatcacttggctgtaatgtttgtccattaccaagctgtaaattgattttatcacccataggatcttcgatagttccattaacaattgagttttcttttgttaaaatcgtttcaaattgttgctgaattttagataaaatttcattgttagatgtatcggctgaagttacgataggggtgtagtactcaggtttggaagagaacgacctcattagttctgtgatttctccatctgaaagtttaaaagcttcctctttcaatttttgaaaagtaccatcttgatttttcttatactcctcattataaacttgtctaaaaccagatatatcgataccaaaattaaaaatgtcataatttttctgttttaaactatttatataaagtttggttggtgttccatgttctttcactggtccatttcgataaattgtacctttagggtaattaagatttaaatctaaataatgaagtttttgtaagtttccagagattatctgtgtttgataactatctaagggaaacaaaaagtaactctccccatttccttttatatcctcgggcttatcagtaagtagaaaattacttttatttagatatccattttttttcatttgttcaaattggctttcatatgatgcacccagtttaaaattattaatagcatatgatctcgtaggaacaccatcagttacatgaacaataattttttgactatttcgatttacttgactcaaaatatcatctgcctccatgaaggctttcatagtaaatgtttctcctactttactaagatagtactccttttgttgctctggagttaatccattggtagtagatccccacttagctttaggagcttctgtcggaatcctttttataatctcttcagcattatttgttaattgtttatgactataattctctgtctgaattgtgaacttagtttgaaggccataatatttatcatcttctttaaatccttttacgacatctacactcctaccatcaaaaatatctgaaccataggtaactaatgcaaccctattatcactgtttgctcctaaaatatcttttactgcggtcccaagagcttcggcagctttcttggctttattatgcctttgaaaatttgggccatcgttattcattgagttagaattatcgagtacgaagacaacatctaacggcttttgtttgtccactggttttactatggtttttccactgacagttaactcaattttatatttattatgagctaaatcacctacttctgaaatacgtttagataatgttccctctggaatttctcttatatgctcaccttcacttgaatatgggttaactgcttttgcctctgactttccatttggaactgaacctttaacatgctcaagtttataagattcctttgtatcttcataaattcctgtggggggatactgcttatctagttcttcctgattttgtccaattgtggaatttttatcaccactattttgtatcgtagtttttccattactctcaaccttaacttgccaagtctggttagtctttttataaccttcgggcgctgtttcttctgataaagtataatctccaggtatgagattatcaaaagtagcttcacctgttagctcagcagttactttttctattttactttctggatgagcagtagtttttaaaacaaaggtagcttttgaaagtggtttgttctggtcatctgtctttttaacaactaactttcctttagcaccattttccggtacggtactttcccctaaaacattggtattaagcggtatttgcgacaaacaaaaaagacttaacgtcaatattttagaaaatttttggtattttctcattttacaactcctattgtgccgaaatgtcgtttctaaatctaagatcagatacagaatatcctagaatatacaaactatcacttattatgatatcaataatttcttattataaggtatggaattttaatgttttttcccaatttttgaataatttttctttttatttgataatcttattttttattatcttagaaatatttcaatgagcttaagtagttgatttttctttttttatgttttaaaatattgcttaaaaataatgtttgagagagtttactgaattgattgaaaattatttagaaaaagacatccttaatcaaataaaacttctaactttatgctatgattactacccttccattactctagacaaatcatgtcatcaacttggtttatctgaactacttattaggaaatattgtcatgatttaacaactttatttaacagtcaactctctctgaatatcgaaaagagtacaatagtctaccaatctaatggtgtaactagagaacaagctttcaaatatatttatcatcaatcacacgttttacaacttttaaaatttttgatcacgaatgattcaggcaggttacctttaacttactttagtgaaaaatttggactatcttgtgcaactgcttatcgcatacgaaaacatattagtccattactagaaaaacttggatttcagattgtcaaaaatactattaccggtgacgagtatcgaattcgctatttaatcgcatttttaaatgctcaatttggtatagaagtttatcccatgtctaagatggataaattgctcatcaaacgattgttattagaacactcaactacttttactgcttctcattacttcccaaatacatttattttctttgatacattgttgtctctatcatggaaacgtattaattataatgtagttgtcccttactcatcccttttcactgaactacaaaatatatttatctatgatacattacaatattgtgtcaaaaatgttattatagattcctttaaaattaatttaaaaaaagacgatatagactatatttttcttgcttaccttacttcccataactctttttctaatccaaattggactgagaagcgtatcgataatgtaatagctattttcgaaaattatcccaaattccaaaaattattacagccactcaaagatgctcttcccttatctggctcctatcatgatgagttggtaaaagttgctatctttttttccgaacatttattttaggattaaatcaattaatccctgaaacaatttcatttccttcatggaactatcatagacatgataaattaactactattctccgaccgataattacaaattggttaagtaaaattggagaatacacgtttaaagaacaacattttcttctcctttgtactcatctagaaagaatcatcaaaaatcatattcctccgatacagatagccgtactaactacagactttattaataaccaaattttaacagaatgcttattacagagattttcttctaaaaagattcatttccacccttactatttattaactgatgatctttccaatattactaatcttaatccagacattattattaccaataaaaagctttctccctttatcaaacatgagatttcttcagagagtttaattacatatattgatctgattaatacttcagaccaaatcaatcaaatccaaaaaattatttcatcaatacaggaagaaaaatattgcaaactttttgcaaaaactaatgaaataactaatcgtagctcctataactcttaaaaattaacattaaaaagctagagcattgtgtaatgctctagctttttaatgttaatttttttgaataatataatccaacttttcaactgttttttcccatgtgaaatgttctttaattcttttagcaatattctgttgtagtttctctcttaatgccttatcttttactaataaatcaagagattcatggagtgactgagtattttcttccatgatgattcctaactcagggctatcaataacttcaactgttccaccgcgatctgttgcaataatagcacttgaaagtagaccagcttctaaaatagaggttggtaatccctctggatacattgaagggtaaacaaagatatcagtctgtgccattaaagacatagtctgttcaaagtttaatttccccaaaaagttaatctgtttggactgatatttctctttcaaatgtgctaattcaggtccgtctcctgcaatctgtaaataaacattttcagagtactgtgacatcgaaaatgcttctaagagcaattcaatgcctttttctttaataattctaccagcataagtgatgaaaatatcatcagcagatttttcaaggtaagccgtaccagcaaaatcagagcctagactttcagataccgaattataaataactcctttagcttctatattaaaatgttttaaccattcaacgcttctcttggataccgcataaaaatctggacgataatgcttaacacgcgctgtgagaagatgttcatagatagctccaaagaaatctaaaaaacgattattgacagaaaaatgacttgacccatggtctaaaacaatactaggtaaatggtgattctttgcaaaagatagcccttctagcgttgttaactgaaaacgtgtattacaaatcacaaaatcaatattttcatctgaaacatatttcatcagcgtgttgtattctcgatttttgttaataataggatagcgctgcttgacaatatttttggtcggtaaacggtaaatttttctacccttgtcttcatctataatcggtaaatcaccatgattagttgttacaataacaacacggtagccacgcttaaccaaatctgctgtcattttatctgtataacgttcaatacctccgaggaagggtagataatatcctgagaaaacagcaactgtttttaccttattttccatatttatccactttcatcaataagccatcttttaagcctttaatcatagcaactatttttttgctcttttgctcttctgctaccaacactcgaacaaattcatttcgcataaatactaaatatttgtatcgcttcttcttaccatatttttttataatatagatcgcattgcgtatcatgtaatattttcgaaatggtgaatgattcaatacatgaaaaacatggccaaattttttaactcgtgaagagtgtccaatttcgtgtaacagaccaataaaattaacctgataagtcttatatcccatctctgacagacgataattcatttcagagtcaacaaaatcaataaacatctcttctgcaaagccagatgtttcttcgaaaacgctcgttttcattaaagcagccgaagtaatacactcttcaatttctttatagtcaaattcttgcatcactaaattttcacggttcatatcttgatacaaacaagataacataccgaccttaggtaaatgaaggtaattttcataattatctatcaaatcacctaggacaaccgaatcttgatctaaagtcaagaaccaatcaaattcttgtgctactgcaaattgaccgatacagttcaaagcatatgcaatccctttattttctgttaaataatcaacagttaggtgcccctcttcattataatcggctactaattgagaaatttcttccttatttttcgagccattatctacgatatagatgtggcttacttgaggataaattgctcgaatgttctgatctaagcgttcaatattggggttaaaggtgacaatacccgctaaatatttcatgttctatgctcttttctaaaatctctaaataactgaatgactggtgctttggttataaaaacgataccgacatagatagttactgctactaaactttgaatgacataatttaccaatgatactgacatttgagtattgatataatagagtacagctccactaagagtagcagcaattaaatagcgcagcattcctcttgttaattctttaaaagtaaatacatctcttaaagagatagcttgatatagggagacaataaattcagtaataactgtagagataatagctcccatagcacctaaaattggtattaaaagtatattaagcacaacatttgccacaagtccaataactgcagacattgtgtaagcttttgtacgtcttgaagccagtagatactgtgtccctaaagcgttaccataagaaatgcaaatgatcatcaaagactcaacagccattagcggaccgacagcttcataccctttcccaaaaaagaagacggcaaatgtcgacgaaactcctaccactcccgcaatcattaacattgagatagcattgcttaaatcaacaagtttcaaaagtaaagccttagcttgcttttcttttcctgaagaaaatagactggagagccttggtaagaaaactcctccgattgctgaaacaatggtaaataaaatacgaataattttatcagattgatcaaaatatccagcactgaccacactatccattgctcccagcatactcttgttaagagagagataaatctgcatggtgatttggggtaaaaataacattaaagttggtcttagatgtattaagatatctaatctactaaatggtatcttgatgatttcatgctttaaatgatgccagactgttaaatttccgagtaatgatgcaaatgcaattaaaaacatataaagtgctaggtcatctggcgtcttcacaactaagaaggtcaaaacaactgtaataagcttaacaatggtattacgaatgacaattatcttaaagtcttcaactccaataaaataccacgaaatatcagttgcagtcgctaataaattaataccttgaattaaatagaataattgccattcgtttgtaagtaagacaaatccaaagaataataacgttgctatagatacagaggcaagttttaatacaactaattcccaaaatatcttacttctcttatacttatttgactgcacaaaagctatctcacgattaccgtacaaagatatccctaaagcaccaaataaagtaaagtacatgacaatggagctcgtataggcattaataccgatgccttgaggagatagtacacgggaaacataaggaactgttactaaaggtaacaacaaagtcaataactggtatgaggtattataaaacatatttttcaaaagtttcattagtttctcctcataattaaactaataacagtatcaaataacaataaggcatttgatacaattaccaagccagttaacgcatacggcaccactttccttcctgcctcatttagacgcgctggaatacttgatgcaaaaacttgtaccaaaagcaatgtaacagtaaagtaacgtccttgaactccttcaatgtagcttgttggcgctccacgatattctaacatgataaaaaagacaccaagaattcccacaaagaaactagctaagaaaagaaatcccatattttttgacttaacaaatttttcttcagaaaaccatactagaaagaccatgagataccatactgatgatacccaagtgggaataaaattctgacttggatatggagaggcaagccaggaagtaatgtcattacttaaaatattgataccagcataattatagccaaatgtcattacataacgtcttaaaacagcaaggacaccaccatgtcttgcggtcagaacataaactatagcaagtgacaaaaaggttagacatagccaaaatagctttttagatttaagaccttgaaataaatgtgatagcttctgattatagcccattaatttaggattgttaacctgcaataataccggtattactagcaataaaaacagccagtaattctgcttacatgcaacaatgactaaaagaatcaatcctataagagcaatactaagatttttagtcaacgatttatcaactaaaagatttatcaaaagcgataaaaatgctccaaatacaatatatccagtcgagtcataagatagactagcaaatgaatttagaactacgggactgaggaaaatagcaaagtagattaactttccttttttcacataccggataatgagggcaaccaaggtgattgagacaaaggaactaaataaccttgctactgtaatcattacccccatagaaggatacacaaatttgcctaaaaataagccaactgctggcacaagatgaccccaaaaaacaaagttatgtttagaatagtttatctcacgaggcaaatgattaccatcaacaaaattggctttatttaaatagtatttttcaaatctagtaccatctctataggaggtcgattgtcgtctcatacctgaatcaatattatattctccatagtaagaagtatcaataatgttatttgaaatacgaccagacacagctaaatggtattgtccatcaggttcattgaaaaatggcattaataggctcaatacaatagtaatcgttaagcctaatataaaatatgttttatgcaagttcttgtctagaaaaaacttttcaaatagacgaacttttttgaggttcatattaactcctttttatatcttttaataaaaacaccaagtcacgaatgcgatttgaaaagctatcatagaaccgttttttagtcatcatttgtttaagtattgctacaaaatctttattttgagcatttttataacgttgctgattaaaatccagataagctttagcttcccttaattgactagagctacttttttctaaaaatggtacaaggatgatatagtaactcaaaacaaaatacagttcttgtaaatgcctttcgtaacttgagctcatattcaagatattcccacttgcattctcagcatgtcgcttatgttcaccaacacttctgtttaaattgtaacctgaaccaatgacaccagatacccctgcaaaaagattatcatgtgacaaaattaaattatcactgtaaaaagtcattacttgatcaacaaacgacttgcgtaaacaaaaagtccaaccttgacgatagttatgatatgaaaagtctaatggatacttagaaattgtttcctcaccattgaacttaaaattattgggaatagtagcctcttctgataactttttgatatcaatatcggcgctaagaaggtttatatcttggcgttcttccataatatcaacttgcatcttatttttatgatgataccatgtgtcatcttgatcactaaaaaagacatagtcaacctcataggctaacacatcaataagtaattgacgaaaatttaaacgccaacctaaatttttatcattactagttattgaccaaccatctaaacggtgctcttttatatagtcttcaaccacctttacagtatcatcagtagagccatcgtccctcattaagacatagtctggtctcaacgtttgatttctaattgaatctagctgatcgtggatgaaaccttgaccattatatgttgccatcaaaactgctgtttttaccatattattccttactttttaaacgcaaataataaatctctcatacgtccactattagagttatagagtcgccaatttttaatcacaaaagcactattatgaattaatgacaatttagaagcttccaatctttctttttcaaaggctaagcgttgatttaaagcgacatcattttgatatttgttgacaaccttctgcatggtttcgtaaaaatcaacaaatgtttttaatcctgtgatatgttgtgttttaggcgacttccaattcaaaacaaatttgctattaccacttgcgtttcctccatatcgaatatgaactcctacgctttcgttaaggttataaccatttccaataatactggcagttgtctcgataagattatcgtgcgaaatattagctccaaaagtccaattatcagcgatagcttgcgcaaaatctctcttcatagcaatggtccatccgggacggaatgtttgataatcatatactttaggatactgactgattctatcactagaagaaaaagttagaaaatgtggaacactggcttctgtagacatcgttttgatatcaacgtctgcactcaaaacctcaatttgaggtttatctgacataatggcaaactgtcgttcgtttttatcaagataccaaatatcatcttgatcactaaaaaagacatagtcaacctcataggctaacacatcaataagtaattgacgaaaatttaaacgccagcctaagtttttgtcgtttttaacaattttccagccttctaactcatgttttgcgatatagttattgacgacattgactgtttcatccgttgaacaatcatccctcaataatacataatctggttttaatgtctgttggcgaattgaatcaagttgttcagatataaatatttcgccattgtatgtcgccattaaaactgctgtctttaccatattactcctcaaatgcttgtactgtttttaatattccagattcaagagaaacttctcgcttccatcccaacgcttctaatttggccatagtgagacgtgttctccccattttgctataacctgcactcatagttttaggaatatcgaatactactgaaatatttttatcagaaaagagatcaactaacttttgtgccaaatccttaatcataatgggttgatcttcatttgctacattgtaagcttgaccaacttcaccatttaataaaatagtaaataaccctgatacagcatctgctaaataacagaaagcacgctctgctgtaccactactttttaaaacgatatctttgccatcaatgacattcgataaaagatcattcataatacgaccatcgttaccaagctccataccaggaccaaatgaatgtgcaatacgagcaatagtaaagggtaccttatattgatcatagtaactttgcagtagagtttcagccatacgtttgctttctgggtaacaagctctagtagctaaaatatcaaatccaccataagcttcttcatcaatcacttctttaatagatgttccatatacttcacgcgttgataagaacaagaagttttcaattgttttttcctttgcaaagtctaataaattcaatgtaccaattgtattagcttttatgatgctaacaggattactcaaaatagcagttggactagcattgcttgctgcatggataatgtaatccacttttccatcatactctaggcgttcttctacatcataaggaattaaggtgaaataatctttcccaactaaatctgaaaatttatcacgggctttttcaatgtttctagctgtcgcaataatttgcgtttggtaatttcttgtctcattgagataggctagtaaaaataccatataactcgctaacatactattagaaccacttattaaaacgcctttattagcaattctttcccaattaatataattttggttactaataagtgctaaatcttcttgtacaattttattactaaatttaatcatcattacatcccataaatttgttcattttctctagcatcatacaaagctttaaacatataaaaatcatctggtgttgttatcttgatattttcatatggtccctcaacaatagtgagttcacgattgtacatacccatcaaagtactagaatcaattgcatcagtaatccctttgctaatggcatcacgttcaacagaaaggatatctgatagataaaaactttgtggcgctttagcaatgaaggaacgagtacgatcaacaacttcagatattttagaagaatcattgactagaacaactgtctctttagcacgaactgaagttaccgcacttcctgtttcttttactgactgtatattagcattaataacttcttcattaatcaatggacgtactccgtcatgaattaaaacaacggcatcatctgtagccagctgttcagcggcttcaagccccttaaaaattgacatttggccagtttctccacctgcaacaactgcttttactttcgtaaggttgaaacgctctaccagattattcatataatctagccagtctgatacacagacaactactacagcatcaatagcttctgtattttggaaaatatcaattgtgtgtacaataatgggtttaccatgcacttctaggaattgctttggtttacctttggtattcatgcgacgaccaacaccacctgcaaaaataactccaatattcatcattaaccttctttccagtaccaagtgtaataactatgactttctctcttactttctggaggtaattccatataactacccccatataattgattcagataagcatgctcatttttaatttttcgggttttaatgttttcaaacataacatcttcatactcagaaaaaatttctcttggaaaatattctttcaagcgatatcttgaatcggtataacccatgtaaggaacctcttgattattatatgtttccatcacttgatcaacaatttcagcacgttttttagcttggccgtgataagcgatgaatcggggtagccccaaaattagccttgcatttgcataaagctttcgggaaccgctagcaaaattggggtaagtcgtacacatcaaatttgcagcagcagagtgaacttttttaaagaatctttgacgttcttctgcactctctggtaatcggtcaagtgggaagatatcaataaaaatccctgtccaaggatgaattctatctgttttacttaagtacattgactttgtgtgatacagcttggcaaatggccatagatttttttcaacagaatgatgtagcaatttaaaatcgctattattagcatcagctaatgctttcatcaaacgctcatactggcttctttctagcatcaaatcaatatcgtcatcccatggaatgaatcctttatgtctcattgctcccagtaggctgcctccgcctaaagaatattcaattttattatcacgcgcaactttatcaatataagctaacatttcaagttgaacttctcttatttctgagaccgtcatttctttcataattacctctgtctaacagttaactcacattcttttaaatacaaatcttatagctgtaatatagaaaataaataaagctactgcaaaaagaatcactagggtcatgggtttgaaagttttctttgttttttgaccttttggagtgtttgcaagtgcattgtattcttgtttgttgtactgcatgtccattatataaccatttatattatagttaccaaattgtgctttagaaacactatctttatttactgtaaaataaaatggtttattgctttgtaagtagccttttggagattttgtctgtattaagaaatacttatatttattagacaaacctcgtaatttaaataatgattggttacttttcacttgttttttatagttataagcccataacctaggattcaagtctatgtcatttgaatagccatcaatacctataatgttatttcctctaatatggtaagcattttggttaagatattctttatttaaactcttaatcgttttttgagtatttatccaaaagccattaggttgatatagagatacttttttatctgcattcaatcttcctaaaatatactctgaaccttgtaataatctattttgattgtcgtcatacatggcaaaatttataccataactgctcaaactaggtgtctttatatagcctttagaatcctcgacaaaaatcccttgatcttgtttttgattatcaacagaaattagactccgtttagtctctatgacgcctttcttttcctgagcaacagacaaattataatctctttttgaagcaacatgtcctgtaatctctaactctttaatatcagcatttgtcaaatcaaagtctaacttatcaatagagtgaagtttatacaggctattttgtaataattctttttgctctgtttcatcaccactactatttaaaacaattttatcaccatcgacactaatactgctatctattggatacaaacgtccctctttaccttcttccgcaataataggcgcttgagaaagtcggtaattataattagtactatctactacaaaattagggctaactctgacagtcagctgctttgaataaattggaatcctataagtaatacgtttaccgtattcaactcctatagtatctctttttttgttattaacagttactcgaggattatctactcgggtattaccaagataaatcgtttcgtttttctgaatatttttcaacacatattcttgagtttctgcgctgttttcaaaagcagttaaaccaactggaatattaccaattgcttttcctttgttatttgtgaacttataacgtttattttctggattatataaaacacttggctcttctaagccattcatgtaaattaaataatctttattcttttcaagcagtaaccttacaatagcaatagcatcctgtctagtattttttataccagaaccaaatctatagttattatccataaggacttttttaccactaacttggtacttccgcttgatactatcaaaagtatagtgtgtaaagtctttgctctcaaactcccccgtcctcactttatccaatgctgtttgtaaatgaatagcattaatctgaacactgtattgcggggtattattatgataataataagctgtaatatctacttttttatctgtttttacttttttattattttggcaacctactaaaaaaagcatgaaaaacagacaaataaaaatatgttttttactcatctaaagtgctatcctctatctcttttttcaacaaagaaacctcttgaatcaggcgtttaatttgctcatctcttttggtattgctactagtatcaaataattctaaacaaaacagaaataaaatagcaccaaataacaagaaattcatcgttaaagcgaatccaaggtgatgagcgataaatgagaccaccccaggaaatacactaataaagactagaattaaaccaactaatagccaaggtaaagaacgtttaacagaaaatgtgtttttattaaccattcttataatcatataaagtaggacaatggctaaaataaacatttcaatttgcaatgctaaactcatttatcatcctccttaataaaccctgcaataataattgatgttaaaacatccgtcatataaaaaatcgattttagggaacttatacttgaagtacctgcctcacgttcaaacatattagctgtgacttccttcaaacgatagccttttttcaaaatccgagcagttgattcaggctctgggtattgtactggataatgacacgataaataagctattagcgccgcgttggctgccctataaccacttgttgtatcatagactttgtgtcccgtcgttaattttatagcagcagatattaaatttatgccaagacgcctcattgctgtcgattgaaaattttgatgttttttatcaacaaagcgagaaccaataacaaaatctgcttcgtcatttaagattggcataacaacatcttcaatgcttctaatatcatgttgaccatcaccatcaaattgaacggcaacatcgtaatgattacgattagcgtataagtatcctgtctgcacacagccaccaatacctagattttgaacaaggtcaatatgatttaaacccaatctatctaataactctggagtaccatcggttgacccatcgttaataacaatataatccagctcaaaaggtagtgagcgagacgccttaaaatctacaatagtctggactgtctttgcaatactaccttcttcattataagcaggtatcactagtaaaatttttttcatcatcttatctcttattgtaataatttgttgcaatcaaccatttaaacacaacttgatgcttaaattgatttttgctataaccatatttccataaccaccttaatcttgtcataaaaggctgtttgtcaatttttataaaacatttaatgagctcaagatcattagctgtcataatatcaccatacttatcaacaattaaggaagcttgcttttgtgagtcatggataagtttccaataccttgtaaatatagatttaggaccttcacgaagtatcttaaatctcttatccattgtcctcgcccccaaaacattattgtcatgttgacggtatagttgagttggtaaatccaaataaatgatttctcctaaacttgctgctaagagtgctaaaaaccaatcatgcattaagatatcattaggagtaaaccacttctcagctaatgcatgatttatcatcatagtcccaccagtaacagtattctcagttagttctggtaataatgtcgtattggcatggtgcgattgagcccgaatcatgctgtcttgtaaaatatttaattcttgattaacaactttcaaatcagtataaacaagtaatggtacatcagatgctttatgctttgctgcctctaaacttacagataacttttctggcaaccatacatcatcttgatcactaaaaaaatagaaatctgcaacttcgtaattaactagcgtaaaaaatgatttaataactcctaaattatggtgctcattttcattaatgaaacgaattcgagaatctttagcagtaaagtttctaataatatcacatgtcttgtcacttgaaccatcatctctgattaggaggttccactctttaaaggtttgcttttggatactttcgatttgctgcgccagaaacttctctccattgtaggtggccattaaaatattaactttcatttaaaaacaaatcctcatattcttcaacaatttttttccaagtatagttttcttgaataatggcttttgctcgatcaccgtaagtagataaatcctgttgttgatcactatcgttaataagcttagctaaatccccctcttttttagcccagtaaaaacttgagagacctgctactgatttgttgaaatcaacatctagaacaagattcaaatcagtattagctaaagcctcaagcagtcctggattagtaccgccaacttcatgcccatgaatataagcaaaggcttgttgacgaacataatccagcagatctttttcatagagcgtacctacaaacttaactcttttatcttgttgaaggtttgtctttaaggacaacttttcaaagtaggggttattttgatggttacagataataactaaatcacgcttagtatctgaagccatgaactccctaatagccgtttcataattgttttcagggacaaatcgaccaacgattagatagtaacccttagacttaatattccattttttaaacaactgtttgacacgtggatcatctgacgataatttcctagaattaatctctgtaccgtaagcaatgaaccttgtcttcacattagagtaggtagattgaatgtaattttcaataccaatattatcagaaataattaggtctgcatttttagtcatacatttttcggcgtattttaaataacgctgtgtgggacgagaccactttgatcgcttccactctaaaccatccggattaacatacaataagccaccgactttatgtattttattggcaaaatgccaaataaaggcaccaattgtatttcctaaaatataaaaaataggctcttttaaatcatgtgtcttaaccaagtcaagggcataattaatggccataatatcataagcaatcacacgtgctggccctaattggggaggatttatagtaaaacaatcagcgtcagcaaagttaaaatgagtatgatgttctttatcactaaggcatgcaacatggtattttatgtcgaaacttttttgatgattaatcaattctgaaacaaaagtttcaaaaccaccgtaacgagctggcaaccctctacttcctataatgaaaacatcttgcatcatcttctccattctagctaaacaatccatacaattataccataaattagaaaagttagctaaaaagagcagtaagctaaaaggattctctagccttactactctttgttttgatcttattttttaacttcctgcttgtagaactcttttaaagcatcttgccaagtaggaatcacaaatcctgttgctttcgctttttccaaactcatagttgaatttaaaggacgttttgcttttgctgggaattgactagaatcaacaggcttaacctccacatctgtgtcttttaagatttcaaccgcaaaatcataccatgttgtatcttctttagcatcatttgataaatgatagtaaccaaaatctttttgattttcagctaaataagtcataaactcagccaaagtacgtgtccatgttggtcgtccatgttggtcgttaacaacagttagagttttgtgtgtttttgcaaggttttgcatcgtaaagacaaagtttttaccatagttaccaaatacccacgctgtgcgaatggtatagaattttgaagtatatttttcaactaactcttcacccatacgttttgtacgaccgtactctgttttgggatcaggcagatcatctacttcccattcttgccccactggtttttcaccatcaaacacgtagtccgtcgaaatgtaaacaagtgttgcatcatgtttagcagcagccttagcgacattctctgtaccagtgacattgattgcaaagtctagctcttttccttcatcttctgccgcatcaacagctgtgtaagctgcacaatggtaaactaaagatggcttcacctcttcaaagactttgtccaccatctcggcatttgtaatatccatttcagctacatcaacagcaacatactcttgagttcgttcgtctaaaaggtgacgtaattcactacctaattgcccgtttgcccctgtaattaaaatcattccttgctcctttaaaaataagtttaacttttaattcttcgtttattgtacactaaaaaagggaatatttcatccctttactctttatcttatgaacgaattcccaaagcgatacgagcataacgactcatcttatcaacagaccaggctgggtaccataccaatttcacctcggtttcagttacctctgggactgttttcataacatcatgaatttgatctgtcaataaatctgctaacgggcatcccatagtcgttaaagtcatatcaatttcagttcgaccgttatcttcaaagcgaatctcataaattaacccaaggttaacaatatctattcccaattcaggatcgataaccatctccaaagcttctaggatacgatcttttatttttccaacttcttcttcgctatattgctttacttctgacattataatacctctctgaaaatattaataccgtctttaagataactcctttgcaaatcatttttattagaaactaaacttcctattctaaaaacgattatcgagaagcaatcaatcttccatgaaatctttaagttgcttgctacgactaggatggcgaagttttctaagggctttagcttcaatctgacgaatgcgctcacgagtaacattaaatactttacctacgtcctctaacgtacgcattttaccatcgtcaagaccaaagcgtaaacgaagaacattctcttcacggtcagtaagagtatctaaaacctcatctaattgctcacgaagaacaacacgtgtagtataatctactggattttcaataacttcgtcttcaatgaaatcacccaaatggctatcatcttcctcaccgattggcgtttctagcgataccggctcttgagcaatttttaggatttcacgtactttatctggtgtcatatccatgcgttctgcgatttgctcaggagttggatcttgaccaagttcttgaagaagattacgttgttcacggaccaatttattaatcgtttcaaccatatgaacaggaatacgaatcgtacgtgcttgatctgcaattgcacgtgttatagcttgacgaatccaccatgttgcataagttgaaaatttgaatccctttgaataatcaaatttatcaacagctttcatgagccccatgttaccctcttgaattaaatcaagaaattgcattccacgtccaacataacgttttgcaattgagacaacaagacgaaggtttgcttcagctaaacgttgtttagccattaaatctccctcagcaaccgcaacagccaattctttttcttcttcattcgttaaaagaggaacaacaccaatttccttcaagtacatacgtactgggtcattgactttagcagaattacttcctatgagctcttcatcagtcaattcttcaggttttggcccttctaccacatactttgttgaaggattgccttctttatctgtgattgaaatgccaccgtctgtcaatcgttctaacaaatcatcaatttgatctgcatctaaaacaaaaggaataacaagtttttctgttacctcatcatcaattgcagtaccttgttttttatgattgcgaataaaatccgcaacttgaacattaaaagttgtatttccttttttctctgccataggttcctcattccatatttcttttttgagcaattaaattttctaatgcagccaaggctccttcttcatcaccttgattactagattgtctaattaactggctttgttttcttaaatcacgttctttcaataaacggtcacgtgccttttcgacggcttcaatctctccaatagatacttctacaggtaattgttcctctaaaattatataataagtacgattaactttgtcactttcttgtgataaatcataagacgtgatctcaccactttcttttagcaactcatataaaacttgtatttctgttgtatcaaaataaaaattatccctattacggaattcatttaacaggtagggatgattcaataatcgatgaaacaattgcatttctgttttagtgatagctgataacttacctgtctgtggtaattgcactgtagcacttgtttgtactgaagatgaagcttgctgttgacttctatgatgcaatcgttcgttattaaccgattgttctacttgaaaataatcaaaatctggcaagagttcagccacttttgtaatatatgaattttgtgctgttatcgatggagatttagcaattaatttcgctattttttcaacataagcaatttcagattgtaaattatcggtgttttcaggctttaagtagtggatataaaactctgtattactgatgcgcccattttctaagagttgtttaaaatcttctgctgaatttgcttgtagaaattcatcagggtccattttattaggtatcctaacgatatcaacagtcatatctgatagcagttctaaagacttgtcaattgcgttttgaccagctctatcaccatcataagtcagaacaactttcttagtaaatcttttaaggtgtctaacatgttcattggttaaagcggtccccatagaagcaacaacattctcaattcctgcacgataagctgcaataacatccataaagccttccattaggtaaacttcgtgtgctttattaattacagcacgcgctttatctaaatggtaaagctcgtaagacttattaaaaataggggtggcacgagaatttttatatttagcttgttttctatcaatgtcctcttgagtccaaactcgtcctgaaaacgcaatgacttcaccaatatcattagttaacggaaacataattctattattaaatgaatcgtaaaactgattgctattttctgaataattgaacaaaccagaagacatcaaagttttttcatcaaactcttttgccagacgacgatatagaaaatcctgccctcccggcgataatcctatttgaaaatgtttaattaagtcctctgtcactccgcgctcggcaaggtattgtctagcgcgttcaccatcattagttgtcattaaataggcatggtaaaatcccgaagcaactctatgaatatctaaaagcgactgattagctttaggttttttaggaacttgccccttaaaattagtatctagaggtattcctgaacgttcagctagaacttgtacactatctaaaaaactaatatgttggtaatcttccacaaatttaaagacatcaccagagcgaccacaaccaaaacaatgaaaaaactgcctatcttcgataacattaaaagatggcgttttttctttatgaaatgggcataaaccaagatgattgcgtcctgtttttgtcaaaccgacaacttcaccgatgacatcaacaatgttaacactgttcttgatttcagaaattttttctttatcaattgccaagtcatgacctccacagaaataacccattatagttttacatttgattatatcattttttcttttctgtgtaaattttttcaaaagctttttcaaggatttcttcttcactgatttaatataaaaatttacagataatttgaaacctattacttggatttctcaaaagaaatctgctataatgaacgtgaattaaataatattaaggagcttgttcacatgattaaagaactaaaagaatttttatttaagggtaatgttttagaccttgctgttgctgttattttaggtgcagcttttaatgctatcatcacttcacttgttaaagacgttattacaccgcttatccttaatcctgtattaaaagctgctggcgtttcaaatatcgcacagctttcatggaatggtgttgcttacggtaatttcttaagtgcagttattaatttcttaatcgttggtactactttattcttcatcgttaaagctgctaacaaggttatggctaagaaacctgctgaagaagaaattattgaagttgttgaaccaacacaagagcaattacttgctgaaatccgcgacttactcgctaacaaataataaaagactcggattaccgagtttttttattaacttatagttataatatatgaaaaaacagctcaattctgaactgttttttcatattctatctaattagaattttttacgtttgcgagctgcttctgatttacgtttacgttttacagaaggtttttcgtagaattcacgtttacgtgattcttgaagagtaccagctttagtcacagaacgtttgaaacgacgaagtgcatcgtcaagtgattcgtttttacgtactactgtttttgacatatgtttcacctcctcaagatattgtaacattttcacgttcacttactaggatacccaaataaaagcagattgtcaatatttttatgatactttctctgggttattatttccctatacgtgatttcaatttttccacaaaaaggtatgccgctggacaagtaagagtattttttatcgttaagttattaatttgatagattttcttacgatcagtatgtggaaattcacgacaagctttaggtctgacatcgtatatactacataagttatcatcgcctaaaaacggacaaggcatcgctttaaatactttatctccatcttcatctacttctaaaaataaatcttcaaaagccgataacttcatccggaaatgtttagaaatcctagaaatatcagcttctgtaaatagaggacccaaagttttacaacaattagcacatgctgtacaatcaatttcttgaaaaacctcttgatgtatctgttggactattttatctaagtttttaggagctttcttttttaaacttgctaaaaatttacgatgctcgccttgtttttggagcgccaaatctttatatttttcaatattaattgaaccctgaaccatatattcctctgcctttatgctattattcttagtcaagccatattataacatccaaaaaagcctatgactaggctttttaatattattcaacttgattgccagttaatttagccgcatctgaaatataaactttatatttatcttctttttcaagtctctttatcactttgttaacagtcttcaacatttttccactgtctttaggtaaagctacagccttagcatccccttctcctgttttaagggcaaacttagcaagaacaaggtctggattctgggccaagtaaccttcagctacggttttttctaaatcaacagcttctaccttgcctgattttaactcactaatcgcttctcccatcgctgtcagtgacacgacgtgagaatttttgaatgatttcttagaaactccctcttcgatacttcctttttgtactgctatttttttacctttaaggctttcgattgaagtatattttcctaaatcagacttcctaacaagaaccgcattttctgtagtgtaataaggttttgaaaaatcatagactttagcacgctctttagtatatgataatccagaaatagccatatcagccttacctgtttgtaaacttgataaaacattgtcaaaactcataggagatacctctagtttgacatgaagctcatcagcaatagcttgagctaactcaatatctgcgccgacaactttatctttcccattaacaagcgctttaaactcaaagggagcataatctggactcaccgctaaaactaacttcccttttttctcaactttatcttgtagctgtttgtctgatgaaccacacgccaccaaagtaacgacagataaaagagataaaattcctaatattattttttttgacataaactatcttccttttattatgataggaacaagtataaatcatctttatacataagtcaagtttttttgaataaaaattcagtaaattacaccgataactatgcttgctgttagacgatttttaataacaactataactaattaaaacaatcaccttttaaaagtattccaattcttaaaaaatgctaactatcattaataatcaactaactttcagaaccttgtacagttgctgtctagtaagaaaatgataataattcgatttagtcactctccttgctaaaataataaataaggttgagatgtacatctcaaccttatttattattttctaaaaatcgctttagatatgatataggtcattataattgacaaaagaattgtggtagctaatgctaacagttgaactggcatatgtgataatttaaagagaccaactcctaaacttcccaacaatcccccaataccattcattccaaaggaggaaacgacatcatcaatggcaaaagctttcgcaacgtaatccgttacaaagtaggtgaagagggatgcaaagaatgttacagctaataattgccaagttaagagatacccaactcctgctgtactcgtcacaagaccaacaataatgccattcaataagcttcctgttttctcttcctcaccattccacttagcagccaatgtccacgccaaaccaccacctataatagcaaatatagtatttaaaagtatcataatggcttgtgaattccactcaccaactggacccatattaaatccaaaccaaccaaatgtaataagtatcattcctaaaaagagactatcatttttaaccttattgtgctgatgttcactcttgccaataacatgagctaaaatatacgaagaaagccctgcagataaatgaacgatcattccgcctgaaaaatcaagtactcccatctttgcaaaaacaccctctgaattccaaattaaataagctaagggcgtatacaccaagaaaagccaagaaacaacagctaataaaagtcgcttcgtctgaactctatcaataattgacccaataagcattactactgcgtaaagggcgaaacaaagttgaaataaacaatttacaatttgtttaccatctgcttcttggaattgaaagacagttttaaaatgaccttcaaatgctaaaaaataggcacccatgaaccaagctgttgtcgttagcaaaacagtaagtacaaactgataaataatccttgaagtcaatgattgatgtagcgacccaaagtaatagaatgcaaccccaaaaatcatgagccacatcgataaaatacataatagtaaaaacacaaatagtcctttctttacaaacactcttttatttgttaaactgtattattgttaactggttaagtattttatcttacacatttatttttgtcaaggagaagacatgaaacattatcaaaccataattatcggtgcaggcgctgcaggaatcggttttggttctgccatgcaacgattaggacttacaaattttcttatcattgaaaaagggcacattggagaatcttttttaagatggcccagaacaacacaatttatcacaccttccttcactaccaatggctttggttttccagatctaaacgctgttattccagatacttctcctgctttctcatttgaaaaagaacatctttctggagtggaatatgcacgctacttacaattagttgctgctcattataatctccctatccaaaacgaaacatctgttctatctattgataaacgagatagcctttttgttattaaaacttcaaagggagatttttctgctgattatcttattatggcaacaggagaatttcaaaatccaaataccattgatattaaaggtgcagatctaggaatgcactatggtcaagttgataatttccatatcaaatctgacaatccatttatcatcattggtggaaacgaaagtgcttgtgatgcactaacacatctagtatatttgggaaatcaagtcgaattatatacagatacgtttggtcgtaaagagagcaatcccgatccaagcatctctttatcccccctaactaaagaacgtttaaaacatatacaagaccacaaaaaagaatattatagtatctctgaaggcaagaaagccattgagattaaacaaattggaaaacaatatcaagttacttttgatgacggtagtactgcggagtctttccataaacctattctttccacaggttttctaaatacctgtcatctcattgacggaatcgctttatttgaatacgataaaaatcagttgccaatagttactgaagatgacgaatctactatcgttaataactgtttcttaattggtccaagcttacgacaaagagatactattttctgctatatttataaattcagacagcgctttgtccctgttattaatcatatcgcacaacgagaagggattatattagacgaagatacccttgaattctttaaagaaaatcaaatgtaccttgataacctagcttgttgcgatgtcaattgtgattgctaaaaaatcgctagctttattgctagcgattttttaatattaaacatttgctacttgaggtaaggattctccaatagcttctaaacgttctgcccattcttgacgtgataaaccattttcttgcacatagcgattacgttcatgtgcacgacattcaggcgagcaccctcgaacatacttcgcttcgttttcttctgaagcaaaaatttgtttgttacaaaacggatttgcacaattgacataacgttcacaaggtgttccatcaaaataatctttactaataacagttggattaacatgattaattggcaccgagatacgatcatcaaaaacatacatcgcaccatcccaaagttcaccttgaacttccggatcttttccatatgttgcaataccaccgtgtaattgtccaacatctttaaaaccttctcgaaccatccaacccgagaatttctcacaacgaacaccaccggtacagtacacaacaacacgtttttccataaacttatctttgttgtcacgtacccattgtggtaactcacggaaattgcgaatatcaggacgaattgctccacggaagtgacctaagtcatactcataatcattacgcgtatctaaaacaacagtatcttcatcaagcaaggcttctttaaattgtttaggatttaaatactcacctgttgtttccaaaggattaatatcgctatcaaagttattatcttctaacccaaggtgcacaatctctttcttataacgaacaaacattttacggaaagcttgttgattttcctcgtcaatcttgaaccaaagatcagcaaaacgctcatcgctgtggacccaatccatatacttctgagttgtttcataatctccagaaacagttccattaatcccctcatccgcaatcaaaatacgacctttaagcccaatagatttacaaaattctagatgtttcgcagcgtactcttccgcattttcaattgaaacatatttataatagagtaaaactctgattttttctgacattttttctcctcatctgcaaaataagttagtatacttcattatataacgactccttacaacatagcaaaaaatacgcttaggacatattctttgctttaaagacaaattattcttcttaagaacacacatatgttaaaatagtaaaagactaggaggacttttatgacttatgaattatgtctagaatacggtacttatccacttagacctgtagatgcttgggctgatgaaatcaatactgcacctgcgtttattactgaagataaaaaacttttagaacttttagaagaagtcaataccttattccatgagctctttttaacgatagaatgttccttccactatattggtcatgacttcccagaaaaaagagcaaaaatcacacaaatttatcatgtgattatcgaacatttaagcatacactaccctgaatatgacattaaaattgaatcattattaatggggtagttttattttaactaggtagaaactatctattaaaaacaatcgatatcactaattacttcaacaaatagattatctaaaacaaaaaaggtctctttcaagaggccttttttcataacttatctcactaaatattaaatgatacttttaccaaataatatcaccaatactctagactcttatctcttgaaagcaaggtacagacaatagccgcaaatccagaaataccaaatattataaatgctactccccaaccaaagtggtcaataataataccaatagctagagtagcgatcgttgctcctccgacataactaaatgtgccagtcaatcctgaagctgctccagctgctgcttttggaactaactccatagcatacaggccaaccatcataacaggaccgtagattgatgcccccaaacctagtaaaataatgaagtctaatgccatatattgaggtcctgctggaataaaccaataggcagctagtaataagattgctacaactaagaaggctacattggttaaaggtttagagtttttaaacactttggcagatagatatcctgctgttagcatcccaataataccacctatttcaaaaagtgaaaaaccacccataccagctgttgcagtaataccttttccaccatcttgcacactcgtcgctaaaaacttaggagtccatgagacaataccgtaacgtaaaatatatacaaatattgaatacaaggatgcccacatcagtttagtatttggtagaatatatttttttataatttcgcccatacccaaaacttcaggctcttctaaaatgtcacttgaatccacaacattagtatattgctctttatgatactcttctataggcggaagtccgatagattctggagtatcttcttgtaaaaagtaaacaagaacagccaaaagacaagccaccacccctggaaaccaataagcagcacgcgcttgattaagagaatcattaccagcaagagctagacctacaccagttaaaatcggcgctattgctccaccaaaattgtgagataaattccaaatggtagcatatttaattctttctttattatcataccaatagactaatgtacgcgctccaggagggtatcccatcccttgtaaccaaccattaataagatacatgatagtaaagagccagatactagtaattacagatggaataacaccgattaacacattaactagtcctgtaagaaacaaaccaactggaaggaaaattttagaattcgattcatctgaaatcaaaccagaaataaatttagagagaccataagcaatgtagctagcacaggtaataataccaatctcagtagcagacatattaaggataccagataaaattgaagtcgtattacgaacaaaatagtatcccatataacctacaaaaatagaaataaggacttgtacacgataacgaggatatttatgcttaatttcctcagctgataaacgttctcttttctgagggggtgcaaatagttttttcaacatagcaaattacctttccgatttttagatgtgtttaattatacaactatgaattcacactgtcaattaattaataatttattttttatcattttatcttatttttttaaatgtggataatactctttaaagtgtggataatactatattataaagctttttatctgatttttctgtattttgaaatcaaattatattttttaattttagtttatatttcaaaaattaaaacaccctataaccaagtatcacagggtgcatatttttatattatatagaatataaatacacatgcaattaaatatttagaataagttctgctcagttctatttttaaagtctacggacaaaaataaatacttatagttttattagacaagaaaaaagtaaggttgaaaaccttacttttagagactttttaatttgaatgccaaatatcttgattatattgttcgattgtacgatctgatgagaagaaccctgctttagcaatattgtgtataactttcttattccatgattcataatcttcataatcagcaagcacttgttctttaacagcaatgtattctttcaaatcaatcaatgtcatgaaccaatctttacctactaactcatcatgcaatctctttagtcgttctgcattaccgagtgacactatatcatcactaatgataaaatcaacagcttcacgaattactttgtctttatcatagtaatcttttgaacgataaccagatgtttcataaagattaatgatagtatcagagtctttaccaaatgtgtagatgttctctttgccagctaattcagctatttcaacatttgccccatccatagtaccaagagtaagagcaccattcaacataaatttcatgttacctgtaccagatgcttctttggaagccaatgaaatttgttccgaaatatctgttgcagggattaacttttccgctactgtcacattgtaattttctactaaatggacattaaggtatttattaacttctggatcattattaattaattctgataagcagagaattaagtgaatgatatcctgtgcaatagtataggctggagcagctttaccaccaaaaataactgttaatttacgtgatgggaaatgcccacgtttaatttctaagtatttatgaataacatataaagcattcatttgttggcgcttatattcgtggaatcgtttgatttgtgtatcaataattgagtattcatccaattcaatacctttattttccttaaggtaacgtttaagagccagtttgtttttaaatttaatagcagctaatttatcatgaacttcattgctatcagcataagttaacaatttttcgagctgagtcgcatcagtaagatagctatccccaattagttctttcaagtaatctgctaaatcttggttagcaaactccaaccagcgacggaatgtaataccgtttgtcttattgttaaacttatctgggtaaatatcatagaaaacctttaattcactatttttaaggatttctgtatgtaatgctgctacaccattaacgcttgttgagaagtggatatccatatgcgccatgtgaacacgtccagcttcatcaataatttgaacctctggatttgtttgctcttcacgaatcatttgatctaattttttaatgattgttactaggtggggtactacctcattaagatactctaaaggccatttttcaagagcttctgcaaggatggtatggtttgtatagccaaccatattgcgaacaactgacacagcttcgtcaaattcaaaaccatgtttttctgtcaataaacgaatcaactcagggatgaccatagatgggtgagtgtcattaatttgaacataagcatattcagctaaatcatgaaggtttgaaccacgctcgattgcttcatcaattaataattgagcagcatttgaaaccatgaaatattgctgatagatacgtaataattctccatttttatctgaatcatctggatacaagaacaaggttaaattcttcttgatttctgtcttatcaaaagtgatacctttttcaataaggttataatcaagtccatcaatatcaaaaaggttcaaataatttttagtatctttcttataacctaatacatcaattctatctaggcgtgattttaaagtaaagtcacggaaaggaacatcataagaaatatctgttggtactaaccaagaattattctcaatccagtagttagcttctgcttcttgttgattgttgcgaaatacttgtttgaaaagcccacagtgatagtttaaaccaacaccttcaccattaatacctaaagaagaaatcgagtcaataaaacatgatgctaaacgccctaaaccaccattaccaagtgatggttctggctctacatcttctatttcagcaattgatttacctacaagttctaactcttttttgacatctttataaatccctaagttaatcaaattatttgaaagtaatttaccaattagaaactcagctgaaatatagtataccttacgttgagagctattttttgatttagcggcagcttcttcttttacaaaatttaacaattcaacgtaaatctcttcatttgttaattctgataatacttttccttgttgtccaacgtaagttgtaaaatttcttgtcatgataatattccttatttattccctctattataaatagttgtaatctcttttaagaatgctttgcgattttctgttaagtcttcttttctcatacgccattgccagttacctccaacggtatttggcatgttcatacggctatctgcaggtttatctagtagatcttgcatacatgtaatcgttgtttgactaacggttgcatacaaggtacgcagtacagtctcagtaatgggctcatttggcaaacgacgcatgtaattttctgcataagctttctgttcgactgtaagattttcaaaccagccattaataacttcgttatcatgagttccagcatatgcaattgtattttctgtgtagttatgaggaatatcaatactatttcctgttgtatcataaaaaccgaattccatgattttcatacctgggaaccctgttccagccagtaatctctctgctctctcatcaatatagcctaaattctcagcaataataggtaaatcacctaatttttctttgatagttgcaaataattctggaccgggagctggttgccatgagccatcattagctgtttgataatctcctcgaatttcccaataatctgaaaaacctttaaaatgatcaatacgcaaatagtcatacatcttaacaccagattgaatacgataaatccaccagtcaaaatctgactctttgtggtaatcccaattgtaaataggattgccccaaagctgaccatcgtcagaaaaatcatccgctggtacaccagcaatagcaagtggttgtttgtcgcgatctaatttaaacagttcaggcattgtccaaacttctacactatcggcagaaacgtagattggcatatcaccgataatttgaatccctttatcattagcatattcttttaactcaaaccattgtttgtaaaagaaatattgcgttacttcatgatattttatcacttcactaagcttttgacgatatcctgctaaggcttcttcttcgcggcgtataatagccttgtcatcccattcttgaagcgccttattaccaaaatgttctttgatcgccataaattcagcaaaatcagttacccatttttcttcttgcaagaaatcagatagcattctcgtagctctctcttcttgcaagaaatttttaactgctttttctaaaactggacggcgtttttcaaacagaccagcataatcaacaacttctggatcctgtccaaaactaatattttggtagtcatctttcgaaatgaaaccttcaagcgttagcaaatcaaaatcaattaaatgtgtattaccagctactgcagaaaaagactggtaaggagagtccccgaagcttgttgttgttaagggaagaatttgccaaaatttttgatcagtttcgaccaaaaaatcaacaaaagcgtaggcttctcgtccaaatgttccaatacctaaatcacctggtagagaagtgatgtgcattaagacaccacttgcacgttttttcatattgattctccttttcgattacttactttactcctccatcttaacgcaagcgattgcataagtcaagcataatttaaaaaaacttctatcgaaaattgatagaagtctttatatcatagcttaattattatttttagaaatatctcggacactttcacgctcttctaaagtaaaaggcacaataatagtctcactaaagactttgtctggagatttaatgatgtcaatcagacgacgaacgcttgtccttcctagattattaacattaatatcaaatgtgcttaggtaaggatgaatcagatgtgagaagagagaattattaaaggtcatgatagaaatgtcatctggaacttttaatttatagaaagaaagaaattgcattactctaacagagacagtatcaccaataacaattaaagcagttgtttcttcttctttgactctatttataaattcctctaaaacttgcggattgcctctgtcaaataaaagagctggcttttggtttaaacctaactttctagcacctttaaaataccctaaatagcgctcttctgatacttctgaatttaaatcatctgtaacaaactggatgcttttatgtccttttttatagagataatcaatggcagatttccccatcagctgattatcattatcaatataagtaatctcattttcatagccattagcagcaccaacaacaacaaagggcagtttatattttaataaatactctctgataggatctttttgatccgaatagagaacaataaaaccatccactcgtttttgtagatgcattaattttacttgttctaacaactcctcagaagacatacttgttgcaatagaaactgtaaactcatgctcttttgcttcattagttaatgtagaaagaatctccatgaaaaagggttcacttaagcggtctggtaaaaccagtggaggaaaaataactccaatattttgcgttaaaccactagccaacatttgtgctgcaacattaggaacatagcccagctcttccatagcttttttcacgcgctctttcgtcttacttgaaatagatgcattatcttttagtacacgacttactgtcgatggattaacaccagctttggcagcaacatcttttatagttaccatcctacgacctcttcattctaatcattttataccttttggtatagtcctttgtctattatactctaatctaagaaaaaaacaaacgtttgccttctctgcaaatgtaatactctcactaaaataatcttctcatttagtattaattgatattatttttttatttttcttattttttttaaaaaaagacttgactttttttgcaaacggttgcataatataggtgtaattaaaatattctctaggaggagaaccaaaatggaaaaaaatacttggaaaaaattacttgttagtactgctgctctttcagtagttgcaggaggagcaattgctgctactcactctaactcagttgatgctgcttcaaaaacaactatcaaactttgggtcccaacagattcaaaagcgtcttataaagcaattgttaaaaaattcgagaaggaaaacaaaggcgttactgtaaaaatgattgagtctaatgactccaaagctcaagaaaacgtaaaaaaagacccaagcaaggcagccgatgtattctcacttccacatgaccaacttggtcaattagtagaatctggtgttatccaagaaattccagagcaatactcaaaagaaattgctaaaaacgacactaaacaatcacttactggtgcacaatataaagggaaaacttatgcattcccatttggtattgaatctcaagttctttattataataaaacaaagttaactgctgacgacgttaaatcatacgaaacaattacaagcaaagggaaattcggtcaacagcttaaagcagctaactcatatgtaacaggtcctcttttcctttctgtaggcgacactttatttggtaaatctggtgaagatgctaaaggcactaactggggtaatgaagcaggtgtttctgtccttaaatggattgcagatcaaaagaaaaatgatggttttgtcaacttgacagctgaaaatacaatgtctaaatttggcgatggttctgttcatgcttttgaaagtggaccatgggattacgacgctgctaaaaaagctgtcggtgaagataaaatcggtgttgctgtttacccaacaatgaaaatcggtgacaaagaagttcaacaaaaagcattcttgggcgttaaactttatgccgttaaccaagcacctgctggttcaaacactaaacgaatctcagctagctacaaactcgctgcatatctaactaatgctgaaagtcaaaaaattcaattcgaaaaacgtcatatcgttcctgctaactcatcaattcaatcttctgatagcgtccaaaaagatgaacttgcaaaagcagttatcgaaatgggtagctcagataaatatacaacggttatgcctaagttgagtcaaatgtcaaccttctggacagaaagtgctgctattcttagcgatacttacagtggtaaaatcaaatctagcgattaccttaaacgtctaaaacaattcgataaagacatcgctaaaacaaaatagtacgtctagagtaatgagatgaggtgagtactcttcctttcaattgagagtgcttcccatctcttattttgtaaaataacaattaaaggagaccattatgaataaaaaactgatctcacttgatggtatgtccctaaaagaggtctttcaaaaaggtgatttagcaactaaactatcattcttaattatgggacttgctaacctcaaaaataaacaaattgtcaagggacttttatttttaatcagtgaaattctgtttttaattacctttgtttaccaagttatcccagctgtaaaaggtcttatttccttagggacccaagaacaaggtatgacaactaaaactgtggatggtattaaaatccaagttgcgacacaaggtgataactctatgttaatgctaatttttggattagcttcgcttatcttctgttgcgtatttgcctatatttactggtcaaacattaaaagcgcagcacatttattgaccttgaaagaagaaggaagagaaattccatccttcaaaaaagatattaaaagcttgacagatggacgcttccatatgactttaatgtctattcctttaataggggtgcttctatttacaatccttccgttagtttatatgatttgtttggcatttactaactatgatcataaccacttaccgccaaaaagtttatttgactgggttggttttgctaacttcggtaatatctttagcgggcgtatggccagtactttcttccctgttctatcttggacattaatttgggctgttttcgctactgtaacgaatttcttctttggtattattcttgccttactaattaatacaaaaggtttgaaattcaaaaagatgtggcgtactatttttgttattaccatggctgtccctcaatttatctctctcttaatcatgagaaacctcttaagtgacgctggaccggttaacgccttgttaataaaatggggacttatttcttcagcacatccccttccattcctttctgatccggtctgggcgaaattctcaatcatctttgttaatatgtgggttggtattcctgtaacaatgcttgttgctactggtatcatcatgaatttacctgcagaacaaattgaagctgctgaaattgatggggcgaataagttccaagtctttcaatcaattactttcccacaaattttgttgattatgactcctactttaattcaacaatttatcggaaatattaacaacttcaacgttatctacctactcactcaaggtggaccaacaaactcaacatactaccaagcaggtagcaccgatttacttgtcacttggctatacaatttgacagtaactgctgcagattataacttagcatctgttgttggtatcttaatctttattctttcagcagtatttagtttactagcttacacaagaacaaattcttacaaggaaggggcagctaaataatgaataagaaaaaacgtcttaaccttacttttgtttatattttattgatagtactatcaattatgtggctctttcccattgtttgggtcgttctcacaagcttccgtggtgaaggaagtgcctttgtcaactactttattcctaaaacttggacattagacaactacgctaaactcttcacccaaaacacattcccatttggtcaatggttcttaaatacattatttgtcgctacatgtacttgtatactatcaactttaatcactgtagcaatggcttattctctcagcagaatcaaattcaaacaccgtaatggtttcctaaagctagctttagtcttgaatatgtttcctgggttcatgtcaatgattgcagtttactacatcctaaaagctctaaatctagaccaaacattaaccgctttaatatttgtctattctgcaggagcagcattaaccttctacatcgcaaaaggtttctttgatactattccatactctttggatgagtctgctatgattgatggggcgacccgtttggatattttccttaaaatcaccctaccattgtcaaaacccattatcgtttatactgcattaatcgcttttatgggcccttggatggactttatctttgcaaaagttattttaggtgatgctacgagcaagtacacagtcgctattggtctcttttcaatgttgcaacaagataccatcaaccagtggttcatgtcatttacagcaggatctgttattattgcaattccaatcacaatacttttcatgttcatgcaaaaatactatgttgaaggtattacaggtggatctgtaaaataatcttcagataatttaaagacacgacatttttatttcactgtggtttcttttctaaaaaaggcttgggttctattgaattcaagcctttttctaagctagatagttaaaaaacttggtttaccaagggtgttaacctctacaaaaaaataacttgatagtgctaagtaatttgacagttgcttctatttactatattattaatagtgttatctacaaaaggagcgtttttcatggaaaaaacaaaatcattctttggacatcctcgtggtttgtccactcttttctttactgaaatgtgggaaagattctcatactatggtatgcgtgctattttgctgtactatatgtactatagtgtttctcaaggtggccttggtatggacaagactgtcgctgcatcaatcatggctgtctatggttcactggtttatctctcatcagtaattggtggttttgtcagcgaccgtattctaggtagtcgtaaaactgttctgtatggtggtattctaatcatgctaggtcatattgctctagctacaccatttggtcaaacagctctattcatttcgattgctctaattatccttggtactggactattaaaaccaaatgtatcagagatggttggtaatttatatggagaaaatgattctcgtcgtgatgctggttttagtatctttgtttttggtattaaccttggtgcttttatttcacccattgtagtggggtacctcggacaagaagtaaatttccatcttggtttctcacttgctgctattggtatgttctttggtctcctccaatataccttagatggaaaaaaatatttgactgaagagagtctcagaccaaacgatcctttaagtcctgaagaaaagtcctctctatataaaaaagttgggcttatccttattggtattgttattgtacttattctacttcacttgatgcatatgctaacaattgaagtaattatcgatatttttagtattattgcaatcgccatcccaattatttattttatcaagattttaagtagtaaaaagatttcttctgttgagcgttctcgagtgtgggcatatatccctctctttatcgcctcaattctattttggtcaattgaagaacaaggttcagttgtcttagccttatttgcagatgaacaaacaaaactttaccttaacttctttgggcatcatattaatttcccatcaagttatttccaaagtatgaaccctctcttcattatgctttatgtaccattctttgcttggttatgggctaaatggggaagtaagcaaccttcatcacctaaaaaatttgcgtatggacttttctttgctggagcttcattcttatggatgatgctaccaggtttactctttggagttaacgctaaagtaagccctctttggttaacaatgagttgggctattgtcatcgttggggaaatgctaatctcaccagttggattatcagcaactagtaagctcgcacctaaagcattccaagctcaaatgatgagcatctggttcttaagtaatgctgcagcacaagctattaacgctcaaatcgttaaattgtacacacctgatactcaaactctttattatggtgttgttggtggtataacagttgtatttggatttatcctcttattttatgttccacgcattgaaaaactaatgtctggagttaaataaagacatctaaaaagaactaggttacattcctagttcttttttgtttaataaaattttcttataaaaccatcttcaagtcgcttactataaaacatctctgagatgtcatcttcgtcaaatactctcaaaaagttaagcatatcatatgctagttcaatcttatcaagttgtgaacgttcaatccatacaacatcaccttcatctgacgattgtaattcacctgaaaaatcatatgttttataaaggaataccaaatagcggatgccttcatctgtgtaccaatgcttcataccaactaatttgggattacttattgttaaacctgtctcctcgtgaacttctcgaacgagagcattctccttcttcaatatggccgcctggtaaagcagctcctgaccaagaataacgtttaggatcacggatttgcatcacaatacgtcctttattatcttcaataagacacatattagttaaaataactttttgactgcgtgacattttttcctctagtatataaatttagtgatagagttacaataccatttatttatcaatttttctacaaaataaaggatagtaacttaactactgtaggttaagaaaaatcgaataattccgataatagacatgattaaccctattaaaatagaaataatcagaataagctgcatgtcaaatcgttttttctctcttttttctttaggaatttgatatcgctcttcagatagacgtttattaatactctcctgaagtaaattcttttttttcaaaattttccccttaattaattacagattgatactgagtagagcttgaaacatgacaatcttcaagctgctgttttaatgctttttctatattacatttattgccaattagtggctgcaagtgcgaaataaatgtaaaaatatctttttttggaaaaatatttttaggtgatacaaaacgaatttgatgactagtctcttcgaaagcaaaaattaactgttgatgttcaaaagcagagcgaactgctgataatatctcattatgatgattaatatcaagataaaaagcacaaatatttgataaatattgtatttgatttgttgtgatatttgggtagagtacaacattatcatatttgccaaaattcatgagatcactagacatctcggtcaaagcacctatgttaaaagtcaaattaggaagagaagtcactaaactttctaatgcttcgatttgatcagaattcgtcaaaataagagcttggttatgtaatttttctgtctctttaagaggatacataaatcctaaaaagctaacttgtttttgttcttcgtcagttaataacctcatagcattagcataagcttcataactttgaattacaattttagtgtttggggaaggattgttcaataataagcgcatatttcctggaatatcatctacgagaggctcctgccaaaagagaacatctttactctctagacgattaaggtaaaagcttactaaaaatggtgttgacagagaattatagaagattctatctaagttaaattttgcttcttgaagataatttatgacaaattcaactttagatttaaaaaccttaaactgattattatcatttaaaatataatcccctgtcatatggttctctgatataacctcttgcctatccttattataatatgacgtctgaatcgcttgaccatccgcgttataaaaggtttgtgcaaaacagaacccaaacttattaaagcgatcttttaaaatgactctaccttgctcatcaaaccagtctacctcttttattagacgcttatgatttgggtttgcataaataattctgccctttttgacacctaagtcaacaatatcagcaccactactaaaaccaataatttcccatgtatcaggaactctaagttcattgtagtaaagtgggcggccagcacctgtctttgcaaaaccagtgtaatataaatagggtgatgttacgtcgtctggtaaaaaaccatcatcattcaaagctatagtagggttaatataacctgattttatcaaggaaaaatgtaaatcccaacttgattgagtgtaactatcaaataagttaatcatcttgtaccaactccttaactaagttataccattttccttctacttcatttgttaagaatccttcggcaatggcgtaagaagcttctcgtaaagccttttgatcctgttggaataattgtaacactttctctttaaaagcttctacaatagcttcctcatcatccatatcaaatcgaggaattagataaccattttctccgtctttgataaaagtttgattaccataacgaacatcaaacccaatcaaaggaagtcctgcgccaatagcttcaagtaaagttaagccaaacccctcacttttagaagctgtcaaatataactcataattttgataaacattcgagagatttttatgtcccatcaatcgaatgtattccgttgcattggctgcatttataatatttctaattttttcttcttctccacctgatccatagatatcaaaggtcacttcaggaagaatttctcttatcctaataactgcacgtactaaccaatctacatgtttttcactagctaggcgtgaagctgtcaaaatagagtacggacggcgattgtccattggcattttaagattgtcaattgagcctaccgggatagttataattctaggattatgatttgtaaattgtttaaattgttgttccaaaagttctgtttgtttatcagtggaggtaataaaaaaatcaaatctattagcgttagtaaactgataatcgtaatagttattccataaaatagtgtcagcagtcacagcattctcactaaaatgttccgcatgaacaacagtccctagcttagcgggtttaccatggcgcaaaagactctgagcggtatcagttcctctatccaaaagaataatatcttttgaagtgaaagtcattgattccaaaaaataatcaaaaaaagctactttggatggtaaaagtctgccattgataataaaacgacttgagctattttctaccatctccaaaaaggctgtactttcatcttcattgtagaatctacgttgataaaggtgagctacaccatctttaggatagtaatactctgagaaagtacgtgtataactataataatcttttctgataaggttgttatttgaaacgatttctacacgatgcactttatccttgttaaaattatcaaggtaaactgttaaatagatattttcatcttcgtagaaaaacttgattacccgacctttatcttcttttcgaacaagttttccaagatattgtttttgcaaatcttctatactaaaagttgtcggggcaagctcaatatctgaaaaaaaattatataaccaaataatttctttatcctgaaaacctatatttcgcgtgaggctaataatattatcagctgaaaaaaaatctgtaaaaataaacttagcatcaattccaagttttctcaaaacagaacctcggtatgcttgagcgtactcaacaccgctgcttgcccaaccaattccatggtttatattataaactgtcattatctttcatctcttatataaaataaatttgaagatctccattctcattgaaggatacttcactcaaaagtagatttctaaaagtttgttcacgaatttcttttttcatgatattgtaggatttatatgcttctttatgatattcgaaaaccgggttacgctgtgccgtttgacgagctgttgccacagtacgtaattgttgtagataatctacttcttcaatccaagcttcatcaatcgcttttaaagcagcagtacgttcaaagtcaccaaaactatcaccaagcaaattatgcttttctcgaagaatctcatcggctattttgaataaatagtttttaatttcttcaagtgacatctctttagaaatcccttgaagattgtaagacatattatcaaatataaaacgatttacttcaaaaatgagttcttctttttctacttcaccatctaaataagcaatgaaggaagaaatcactgtatcaataatctgtcttggactaaaatgtccactttctccattgatcaaagcatttctctcacgataaacatactctcgctgaagctgtacactcgaatcaaactctatcgtttgactacgtgcagactctcccttaccgtcactagcttcctgagtttgctggaataacttctgaaatcttctctgacctaaggctttaggtttttctggattaactttgtcacgatttttcctaaagtaatcttgcgcccatttaggacctgattctatcattagatcatcttcaaatgatacaaaaaattgactaaaaccaatatcgccttgtcgacccgaacgtccccttaattgtaaatccattctttgactcttcattctctccgttccaataactgcaagaccacctaattctgatactcccttacctaacttaatatctgtaccacgaccagccatattcgttgcaacagtgaccgcacctttttgccctgcttctgcaatcatctgtgcttccttaaccgcactttgagcatttaacaggctatgagggataccacttagtaataataattctgagaatagctctgacattctcacagaaccggcaactagtaggattggttgtcctgtatcatgaacctgtttaacaaattcaatcgttgcatggattttctctggtaaggttgtataaatcttatcaggatagtcaattcgtctaacaggagaattagttggaattctaactacttccatatcatagacctcaataaactctttttcagcagtttttccagttcctgtcattccagccaatttagtaaacattctaaaaagattttgataggtaatggaagccattgctcgagactctggtgtgacattaagatgctctttttgctcaatagcttgatgaacacctccttgaagtttagtaccttctaaaacacggccattagtcgcatctagcaacttgatttcaccatcgtcaaccacataatcttttcctcgttcaaataatttatgtgcttttaaagataagttcaaatgtcgcacaagttctcgattagactgtttataaaaatgagggattctaaaatatctctcagcttcacgaacaccctggttttttatccacacttcctgacgctctttgtcaaaataataatcaacttgttcttcaaaactaagaattagttcatctgctattttatagagattagattgtactcgaggtgaacctgaaataactaaaggagtctgggccatatctagaagaactgcatcagcttcatctacaatagcataatgtaacttgggcatatatttttgagatttagatgaagctaggttatcaattaaataatcaaagcctagtgcactacttgtactatagacaatatccgaactataaacagctcgcttagtcgcagcatctctatcctcttcctcattatcagaaactcccacaccgacactcaatcctaaaaaacgatatacttttcccatttcttccgcatctcgaatagcaaggtaggaattattagtcagcaacattgcccccttcccttctaaagcattgagatacaaaggcatagtggcagttaatgtttttccttcaccagttttcatctcagcagtatttccttggtgcagaacaagaccaccgattacctgtacatcatacggaaatagacctaatacgcgctcatcagcttccctaacaacagcaaaagcttcagcacaaatatcatctagtgtttccccattaactaaacgttttctaaattcagttgtcttagcttgcaactcctcatttgatagtgttgccatttggccctttaaactattgatagtatttaaagtacgctgaagtttttttaaacgtttcttatctaacgaaaataaactattaaaggctatcataattgtcgtcctgcttttttaaaagtgtgaggtaaggtagatgttcattaccagataagatcattgatactaaatttaaagaggaattttctgaaaccaatccatagtgctttacatttggagacgtctctctcgtatcccagacttctctaagaaatatttgttgtttggcagtcaagtgtggtaaggatttaagtaaaattccgaaaggagcaaaacaatcattaatataggcagttattctgggaaattttttagcataatataaagcagcaaaattaccttgtgttccatacgcaatgacattaatcttaatgttaggaaaaacttttaatgcatcttctaaccccttttccaactcaggtaatatcaaactatcagaatttaatgagggattgctgaccaactcgactttctgttgcaattgagaaatgctttctattttattaatatatacactatcttttttctcgaccaaaagaagatttaaaacgtcttgatgttcttcaatagtaaactctgtcgatagatttttctcctgaataacgctatctgtaacttcctcaagtttcaaataatgaaaagtaaaatcgctacaacctgcattaatcaaactaatggtataggtataagcctctttaggatagataaaaataatactatctttttttaacagttcaaaaccaacagactcattaaagcgattgtaaaattcaatgcgaacaaaaagagagctaactaaatcgagttctgcatttaatgacaagctataacgagttccctttcttagtaaaggtaagttaggagaaattctttttgactgataattagtctgggagctccatgtatacaagtttgtgctagaaggagctaatggattttcaaagcatactgattttcctaaaaattgtaattttgttccaaaattataagaaaaccttgaaaaatcatcccaataaatgtagcttatcgtactcattcttctttccttccaaaatcattagatagcattcgcctatactgacttgtaaaccatgcaccaacttctgcagaacaatcaccatgtcggccatcccaacctctgcctaatatcttatgcttctttcctctaaaatattgcaataaatcagaaaaggcagtcgcatcatagtcatcgtttttcatataggctaaggcaaaagtcgtatttgaaaaatctccttcttctatagatttccaaaaatagttatttaacttctcagaagaggaactggtcaagtcaccttgattgagtagttgaatatctaatgaagtagcaaatccatctggtctctctaatctttcacgttgagcaactgttcctaaattaaatattggtttaccaataataatagcatgaggatttagcttagcaccatggtaagtagcaccataagtccccattgaaagtccggataaaattaactgatcagaactaaaatttaaaaaggccagtttttcttgaatagcatcaactattttttgttcatattctttgcttcctatataaaaggcaccaccttgtaatcgtggatcacaaattaacatgaatggagtcttcatactcttcatcatccagaatccctcaaagccttcagctgaacgaaatcccgaaaaataaacagttagaggtggtttgaaatctactggatcaaaataagtcataaattcatgacctatagcatctatgtgacgttctcctcctagtagaaatgtgcccaatcctcctctaccattacgacggtgcaatggacctaacttaacgataccctttcccttagcaaaaagtttaactgcaaggctaccactaatatcggactctaaagaaataagttgatttaggtcttccttctcaaagtaccactctttagcaatatcatcaacagaaccatcaacaatcaacgagataaccaatcgaatatctatatcaccctctataatgtgttctaaaaataactcattataaaaatccgatgaaaatggaatattgtaagcaaaattaagcaaaaaactatagttctcaccaaattgcccttctaattcaagatagttatttccctgatagtttactacaccttcaaaatcatttctaatttgtatttgtgaaacttgaagtttctctccgtattgtcctataaaaagccctttataaaattgacgaattagctgatctggagagctactatcatatcgttgggccattttcgagcgtaaaaactcttctgttatccccgtagcatgtttatctttaggataaaatacttcataaacctcaaagaatgacgataaactagataactctggtccataagtttgctctgtcaacaaaagagcagatatttttcgaggtagtttttgcaataactttgacgatgtaagataattattttctgtagttacaaagtcagaaatttgatctggtttaataaagagccattccatattattagggatattctctttagttgcccagttctcttcaccaacttgaagaattgtaagttttatttttgacatatttatttaataactatttataattctttctaccaattgaccacctgtatagtcattgattttatcaatagaataaattaaagaacggttccaattagttaattgttcacaataataaggaattgccttttccaattcttggatctcttcaataatgtaaccgtttttcctgtgttcaacaaattctgttaatattgtatttatctgagggatacctgaacttatccctgcaatttgcgtgtataagtctggtattttcgagatatcaataatcaaacggacatactctaaccggtttatgatatctgtttctgacaaaggatgggtaaaagaaaggcgtgttttttccttttctacttcatcagattgcataagaacttgattggcatcatcgtctgataaactaaagaatttctgatcaaaaacttttgttgcttctttaaggtagtcatatgtcaattgccgactttcaaattctcgttcgtagctgacaaatgttacttttatatcattatttttgagcataaccttatataaggatgttaaagacttttgcaattctttatgggaaagtctatctacgacaaaatatatttctaaatctctaacttgattactttttcccaaagctaaacgcgtatcaaagggagaaacatgaacaactggtttatctattttttctttcaattgtgcagcaatatctagtctatcacaaataatagcgtctgctcgagataaggaagagtaatcctccaatacattgtgagcattattcctctccgagaaaacagataatattaaatttcctttactagtgttcccaacaataaatgcgttatgaacttgattaaagctaacaatgatagtatctgatttactaacttctttatggagataggtcagatatttctctctaatcaactcttcaatatcggagtaagataactttaaaaaatgaatagctttcttaggattaatttcaacatggtggtcaccttctcttaggtattctctcatgatcctttcccctgatggtgctaaataatcttgataggcttcaccaccattatcataatagagaatactagatagaaatcctctatcatcaaagaggtatttcttagctatttgttcatttgcaaaataatcaatatgcgttaaatttccttcttcaccaaattgaaccttagcaattaaatctcctgacttttttaccaaaactataaacggagtataggtaaagtccaccccttcaggccaattgagttgtcggaagtcaatcatttgctgtcttacattcccaatttcttgaatatcatcaaaaactgaataataacctgattctaacaagtcatagcgatgtaaataataacgtaaattgggcatatagtttaagacaactaatctactctcttttccagcataatcaaacatcttcatttggttgatagtatcatcaaaaccgacattagtcggcttgaaataccacaagtaattattatcataccaagtacgattttcattataccaagatggaataaaatgaaacattaattctcctcattttcaaatacagaagtgtattgtttacgaatacgaataacttggaattcatccaatatcataaatgacatccctgtgatcatcataaaaatccctgtcatagatgaaactgtcctaagatcatcatttccaagagcaaataataatggtacccctcctaagaaagccatgaaaaaaccactaaaagttccaaataaataacagattttcgataaataactttgtgtttctttaccaggtctataattaggaataaaatcaccactttctcgcattgcctcagaaattttagtcggatcgatattcacaaaagtaaatgcaactgataaaacaagcattaaaatcatataaataaccactccctgaatagaagataaactaaaatagtcattgtatgatgtgatatctggattagttgggaaaatacttcttagtaaaataataatatactgggggaacattagtaaggtataaacatacataaatgccatcccccccgaagcatttacttttattggcatgtaggcatcatcaacgagacgattatggattgaagtacgcattactggtatacgatattctgaacgttcaaaagttatcattaagtacattgctactagtgtccacaaaagaaataagatgatagcaagttgataaccatcttggaataattcaaaaataagaggaatattattaaattgcccaacaagcatacctaccaccactaaaatagtcattccaccaaacccgtattccgcatttagattaccaatccaggaaataatatatgcaccagtcacaagtatcattgtcgcgagtaataatttggtcagagaaaaaccattatgatattgaaaagatatggttatggctagcccttgaataattgctatgacaagcatcaccacattttggcgaaactgttgaactttttgagatactccactagagtatttaccaatcgtaaatagtcttagtaaaatcattgtggtcatcataggaccaatacccaatgaaaagaccccaacctgagacaaattaccaccagttactgttgaataaagcgtcgcaaagttattgtcttgtcccttataagcagaaatcaagacaccaggtattggaacatagcgaccaagtaaaaaaatgattattaatgaaaatgttatcaatattttacgaagaataatatttttttcaaaaatatatagtaatttcaatggaatttctctttctctatcaatttgttctcttcaagataagtaactttatatcgtcaacttcgttaattttaaaatcaagaaaattgatttcaatattcaagtaaccattactcttcttgactatctattttgtttaatagtgtcacacaaatattcaaaatcatccatggttcgctcaaaagaaatatattgattatcttttcttgcccgtctgattccatatatagttttaccctcagttatacatctatcaacaacattccaaacttcttcaccatgattaatatctaaatatatatcgctatttaataggagtacttcgaattgctcttcagtaatagcttcatgtaggtaataatttggataacctactaactgcttaagtctatccgaacaataaactggggcagcaatatgaaaatcagtattaggacatctttgtaataaatgttctagctcccatatatcatctgttaacgtcactgtcaaagcgtactgtctatctgatgtaccaatttttgatacaatttgattttcgtaactattgtcttctattaaagtaatatcttcgtcaaaattatgttctgccgtatgtttatgagaaagtttcaccttagaaactgctcccatcttaaaccactcatattctgaatcgatatgacctaaatcaatagcttgatgtcctagctgcgataaatcttcagctaatagctttgcagttggaccaagcataagtaaaattagcttacctctactatgttcaagtatagtttccttgatttcataaaaagatgaaaatgcatctttcgaaggacaaatgatacgcgaaatagtattggcatcattaaataagtcattgccaacgcctgaacgagaagtctcaccctcgacaattaaaatatctttatttttccataatgcttttagctgttcaaagtacgttactgacaaactcttatccagtaaatccatatagggtctagaaataaaagttgaaccataccattcagcctgacaatttttttggtacaaatcattatactgatatagatgatccctccaaaattgttgtgaaaaatcgttgtatctacctaaattatcaaaaacatcacttacacagataactaacttctcattactctgtcgatttaataaacgttctaatcgcttagcaagttcagaatcataaacctggtaaggaatagaattccccgcaataatatcaatttctccatcaccaaaacgcgctaccgaagcggtatgtttagaaatataatctaaagtttccgaaattgtttttactttaataactctcataactattaattcttttcaactctctttgcaagattacgacaaataaaatggtatttactgttaccttgataaccgatttgatatcactttatatattattgttttctgtaaattttcttgttctaagcgctgtttatagtcacgcattaaccaaaaatatctctctacagttgcagttgaatccaatcctgatagtataatctccgacaatttactatcaaaaatataaataagatcctctgctcttttggatgaaaacgccgatgtcataatgctatttggacgaattctatagccataatagcttccattaactaaaattgtttttttactttttataaaaagtaaaacacttaccaactcatcttcaaatactttatctattgggaaggtgatggtatcaaatagttctcttcgatataatttcccccaaataacgatgaatactgaactatttaaatgccaatgcacttgtctatcaatagctgtttgagcagagatttcttcgataacaaaatctttgtcagtgatgtagtaaccaaaaatatcttctgtttctctgtagatatagtaattactgataacaatatcagcattatatttttcttgctgagctagcagtacttccaaataattttcctttacccaatcgtccgaatcaacaaacgtaacaaattggctctctggactaattcgtgctaatccaaagtttctagctttagaagcaccgccattttcgatatggaaaactctaatacggttatctcttagggataattgatcgcagatactagcagatgtatctgtagaaccgtcatctatcagtagaatttcaaaaacttggtatgtttgtcctaaaatggtatttacacacccctctaaatatggtgctgcattatagactggaataataacagaaactaatttatcagtcactattgcctccatttttacataaaaactgtcgcatatcctccaaattaataaagcaatgacttaactccctatattcaaatgtcactgcttcattaaaactcaatatcggaattgatttctcaatagctttttgacaaaattgtatttccttccaagaagttgagatatcaaggtaataatttgctttagtcattagttgttcaaaaagtgggctggttattgaaggatacagacgaacgttagagtttgtggctaacttaagtaatcttgggccaaaagaggtccaagcagctatatggaagcaactattggggaatagttcaaccaattcttcaatataaagcaaatccacggacgttgtgaaagtaaagaagtgtttttcaaatgttggctcaggtaacagatacgtttcaaaattaaacacctcattccaatctagttgctcatattgccaccatgtctccctaaaccttgaagaagaaaaagtattccatggtttatcatgagtacagtaatggataatagtaggcgattcaaagttacgatcaaaatacccttgccaattttcataaaaggcacctaaatcatttccaacttgagcattatacttatcttctaacttaagccaattattatcaaaaagaagattgagaaccccttggtctccaaaaattccattatccaattctcgttctgttatttccagaagtttttctgttactcgatatctcatccagtaaagcgagtttattagcataacacctgagttaaaataaataccgtctccatctaagatagctgctatcgggtagtcccctaattctatctcaaacaacttatctaagttatcaacaaccaaagtatcaatatctaaataaagaactttctctgcatcaatcagttgcggaatgtagtaccttgcataagccatataggtaatatgggcacgggcgttttaaattccttaaaagtatcatcaaagagttttatatcaaaaatacaactatgactatttaataaacgtctttgaatatttctaaaccattctgaagctatatcttgatttaaaatataaatagacttcctgcgaaactaaaatcctagttcacggttgatcattccagcaatcaaattcattcgtaatccaaaccgtttgcgtcgatttcgataggttgttgaaaatattttaaacgtttttactttggcaaaaatattctcaaccttgattctctctttggatagcgtatggttataggttttatcttcaagagttagtggcttaagtttgcttgatttcctcggagtttgcgcttgtgaatacatcttcatgatcccttgataaccactgtctgccaagattttagcagcttgtccgatgtttctgcgactcattttgaacaacttcatatcgtggcaatagttcactgcaatatccaaagaaacaattctcccttggcttgtgacaatcgcctgagccttcatagcatgacatttctttttaccagaataattcgctagttgatttttttaggacgattgatttttacctctgttgcatccacaatcaccgtatcctcagcactaagatgagtttttgaaatcgtaaaaccactttgaataagagttgattcaacccattgacttcgacggattaagttgctttcgtgaatgccaaaatcagccgcaatttgttcataagtgcggtattctcgcatgtattgaagagtagccatgaggagatcttctaagcttaacttaggggttcggccaccttttgcgtgtttacgttgataagctgtttttaacacagctaacatctcttcaaaagtagtgcgctgaacaccaacaaggcgcttaaatcgtacatcagttaattgtttgcttgcttcataattcatagaactattgtaccatattttgtttcgcaggaagtctaatacttactctatcattgtgacataaaatcgattttataactgtttggatctgatttaaagatttattatcacctgccaaacaaataacgttatttttcacaatattcctttctaatatgttctttaaatcgttcattctttaaataatcaataatatccgtaactctctcaaattgtttgccttgaccatgataagttgtagaaagggataaaatatctttacctaatttcttcacttgctccagaacctgagtatctgcatcaccatgattaatatcaaggtaaatatctgaattttcaactagctcatttaatttgaaacgataaacaagtggataaagttttatatttgaatgcatttccaattgtttcaatttttctgaaatttgagtataggcagcaatatgaaattgccagtttggtaaatccttagccaacctctcaattccttcaattgaatctgagtaagtaaaaatgaaagctcgatggataggttgtaacactttcttcaatgaaacatctacaccatcattgacttgccatcttgtaaaaatatcgcgccattcaagtctattatattcccaccatatatcgcgccaacgaacagatgtttcaaggtatttccatggttttgtcgctgtataatgaataactttaggtaaatctttcctgcgatttaattgacgttcagactgttggaataggttatataacatatctgctcctgtatgatagttataagtttcatcaagttctagccaattatcgcacagtacatcattcaaaacatcctggtcatgatattgaagagccccttggttttctctagtataatctaacagtcgctgactaatcccttgttctcgccaaaaaatattattaattaatagcaaacctgaattaaaataatcttctttaccatcatattcttcgagcaaatcatctcgaacagccgctacaccatattttgaaatatcaagagtaaatatcgatgttaaatcactggtgataatcatatcacagtctaaatatagtaccttatcttcatgaataacttcaggtataaagtatcgaaagtaagtaggatagggcatcggtttttgaaatttaaaatgtttaatttcttcattaaaaattttagtgttagatattgtgcaatccattttagataaatgatattccatcatttgaaaccattcaactggaaaatcgtcatttaagatataaaaatcaataaattgattatgaaagcatattgatttaattatagtcttaacttgctcttgatagccaaaatctgccgctaacgcgatagcttttctatttttcatctaagaggacctacttcccttattcttttaaccatcaattcaggcattgtttctgagataacttctatattttttgtcgtatgtgctgtagaatcaaaggctaaaatcggtttattctcttcttttattttatctagaataccttctacttcgtaagaatgattaatatccaagtacacatcacagttacgtataagctcttccaagatagggttgataactaatttataaactttaatattgctataagtttctagattagctaatttctctgaaatatcactacgtgctgcaatatgaaactgataatctggtagagcttttgcaagtacttcaatatgttctaatgtatctgaggctgttaatgtaaataaattcagtgttttacctgttaacctgttcaaatttttttgttgttgagcataaataactgaccattctaaaccaaaataataccaccattctgaacggtatcgcgattgactatatttattccacggtttatcttgactattataatgaacaataacaggttcgcaatcatcataaaaatgatacaaatctggtcgcccatatgcattaatattgacatcttgaccaatctgaacattatattgtttaccgatatctatccaacgattctgagtcaaaatattaaggtattcttgatctcctaccccaacagcagaacccttatcagcaatcctcataaggctattataaatttcttcttttttccataatgaattattgattagcataacacctgaattaaaactaactggtgctgtatctccatagtaaagcgttgaaaaatgatctgctacagctcctaataaattctcttcaaggtttatgtcaaatagaggatccaaagaacccctaactattacatcactatctaaatataaaactatctcttcttcaaggtgaattggaataaaccatctgaaaaatcccgccacactgatatggctcagggtaggtatcccctcaaagacatctgaacttatgggaatattttttactctacagtcaaactgttctaaagaatggttaaggatattaaaccattctacgggaaaatctgtgttaatgatataaatagttaaatgttgattatgactaacaatagattttatagttgtcataacttgatcacgatattggaaatctgcacctaaaacaattgttttcttcatcgctacccctatctataaagcatatgcacagcatctatcaacaattttttagtgatataaccatttcgcaagagagttgctatcttctcaacattttccacatagctgtcataagtctctttttccatattattaattttttcaacagcttcttctagcgtttcaactgtaaatcctaatccgtgttgtttgataaagtctctacttgaaatatcatggttagcaataattggaagtccagcagccaagaaagtagataatttatacgaggcattcatcctcgaataacgacgctcgactaactcctctctatcttcactccaacacaggccaaatcctccccgcttagaaagacttagcatcaattctacatcatctttccatccctgagcatgaacatttgcctcagaattgagtctgcttccgtctccataatagatgagcgggatattttccttccagtcattgacaaagggaaagcgttgaatatcgcctgcaaaactaaggactttttgacattctggacgagggaggtctatattaactggatgatcccatacttcttgataaagaactttagaggtagtcatccctttttcaattagataatcatgcatcgcttttgtaggtagaataacaacatccgaacgattatacatgtcaattactctatctaataaataaaaattagactcaaacattaagggaacaatatcatgtacaaaagttataattctagcaccgtatgcctgtaatttatctagaaaaagttcatcaaattctgttgaattccatgtaggtacttgaaaaacaacaatatcccctctgcctaatcccgcaatgataccatccatcctagtacttctttcaccatgcgtttcagcatgatcattataaaagtagattcccatttcatcataaccaagttgacgtccgacatccttaactagtttttgtgatataagggcaatgctacgcggtgactgcccatatatacttgtaatatgtactcgcattttagttaatctctctttaaaactctctcttatccagaccatatcataccagttaaataatagttttattaacactcattgtactaaaatgatccaaagcttttttacattatttttgagtttatcgtaattgataaacttattttcagaaataaattccacttcttaattttatcatattttagcagaaaaacattgcttgtcacttgataaatatagatttacaaggctttttacaaacttctacaacaaaaaggcatatctctctaaaaatattaagagatatgccttttaccatgtcatttagtactttaagaattcaaagtaggtttagtctttatcttttttagatttttttcgtcccaaaagggttgcaccagtcattaaacctaaacctaaggcagtagcagttacagaataatcttggtcacccgtagaaggtaaggcagaatacaccttctcttttgatgaattagaagtcactgagcttgaagaacttgtggaagcgctggtacttgctgatgtcgatgcactcgttgagacgctggtgctggctgacgtcgtggcactcattgaagcgctagtgctggctgacatcgaggcacttgttgaagcacttgtgctggctgacatcgaggcacttgttgaagcacttgtgctggctgacattgacgcactcgttgaagcgctagtgctggctgacatcgaggcactggttgaagcactggtgctggctgacattgacgcactcgttgaagcgctggtgctggctgacgtcgaggcactcattgaggcgctagtacttgcacttgtggaagcactggtgctggctgacgtcgaggcactcattgaggcgctagtacttgcacttgtggaagcactggtgctggctgacgtcgaggcactcattgaggcgctagtacttgcacttgtggaagcactggtgctggctgacgtcgaggcactcattgaggcgctagtacttgcacttgtggaagcactggtgctggctgacgtcgaggcactcattgaggcgctagtacttgctgacgtggatgcactggtactggcacttgtggaagcgctagtacttgcacttgttgaggcgctcatacttgctgaggtggaagcactggtactggcactggttgaggcgctggtacttgcacttgttgaagcactcatacttgcacttgttgaagcactggtgctggctgacgtcgacgcactcatggaagcgctggtacttgctgatgtcgaggcactcatggaagcgctggtacttgctgacgtcgacgcactcgtagaagcactttctgataaaagtttaatttcggcattcgcatctgagtcaccacttatattcgtatgcccataagaatatttagaaccatatgtttgatttatatcagaaacagttgaatacaatacaccactttgtttaggtattttgaccaaaacaacataagatgtagtggaagaaatagaatttgttttccaatctatggtaattttagaaccatcgttagtataactatactgggaagtcacatcttcaaactcaggcgaatcataattttgatccatactatctgtaagattttttgaattagtttttagaatctttacttccgcatttaataaattaactggtgaacctgatgttccatctgaaccgataatagtatatagattcccaagtcctgatgcgaaatacatttccttaccttcaggattaatttgagtaatataagtttctgtctgtctttcatcatcaagcttcatgatccgagatcttacatttgtcttaacattagtatgttctgtcactgaaggactattatactgaacacgttcctcaattgaagcaacttgattgttcaatgttgcagtaaagcactgcttatctgaagttgttttagaaattattctctggtcaggccaaactggcatattgactctagctttaatattattcaacgtagaagcataccttgtccaggtgtatgtaatattatgtgttaaaggactatatgacccagtcgctaataactgccccgtttcatccattatatcttgaacttttagaatagtaccaatcccttgtgtgtcaaggttatcagaaagctttacagtaaagacatctccctcgttaacagaagcgattgaaaaggcaaagttcaaaacaaggttttctgaactatctaatttaactgttccaggctcactaagagtgttatcttttaacgcaatattaactttctgcaactcgcttgatacatctttacctaacatttcagtatcagacacttcttctagtggtatcaagtccatctccgaactcaaagtcatcaagttcatactccttggctgaataactgattttaatctaattgtcggagttagactctcattcccagttttatcgcttgcaatcattacttgggatttctctggagttataagcgactcatttgacattttggaagtctgtaactccgattttggttttgtaatttcaattaggctagatactgaagcatttttaccagcatcagtaactaagctactttctgttactatctggtttgccgaaaacgactctcttcctttatcagttaaagaagcttgagtttcaagaatatttgaaacctcactaatacttgtagattttgaaacactttctgaggctgacgtgcttatcgattctgaagcacttgttaaagcagatgtacttacagattcacttacacttgttaaagttgaccctgacatagacatacttacagattcactagtacttgttgaggctgactctgacatagatacactattagaatcaataatgtttttcgatactgtcccatcttgatgattttgaacagtagttgttttaacagtcacttccgtttgttctgccagtgttggtacagaacttgattgttcttgaacaactggagtctcatctgcataaacacgactggttaaactcgctccacctaccagagctccagcagctagtattcctttgagataggtcaaatttcctgaagatagtcggtcttctttttcaacatcttgaatacacacatctgcttcaacagttgctctccctttaatcgctttaaatagattaaaatgcgacattactgttcttacccagtttttttctgatttatgcatcttgactctactcttagtatctacaactgttaactgcttgccaaaagtcttttgggacatgtttcctccatatataaatattttttatattttgttttggtttaaaaacataacagtaaaattaagtgattagaaatctatcttagttaaacacaaaaataatgataccgttaagcacgtagatacatcatttttatacagatataaaccttacaattgatttttagtatgatttcataagaatctcaactgatgcttaataaacctttatgaggttatcactaattatgactaaaataaatatactttaacccctcattttcccaaaaaggcatttaaaatatttattttttgagaattattattttataaggttaaaatatttgaaacattttatattattccttattatagtattaatgagtgaaaggagttgtgtaatatgatagaaaattttttagaaaaaaatattcttaataaagttaaattacttactttatgttatgataccccctcactatccttagataccgcctgtaaccgactccacttatcaccagttgagcttaaaaactattgtcataaattaaatgttttatttggtcataaactttctatccatatccaaaaaaaacggattttatgtaagctaaataaacttactcaggaagatgccttaaaaatagtttataatgagtcaaacactttacaacttcttaaatttttaattgatgactcgtctgataaaaaatctctagtagcttttggaaatgatctcttcttatctcgttcttctgtctatcgtctgcgagaaaatttaattcctttaattaaagatttaggattatctttatctaaaaataccattgtaggtgacgaatatcgcattagatatctcatcgcatacctcactactaaatttggtattaaaatttacgatctgtctgctctagatattaagattattcgacaatttttatttgagagtggtactaatataagacctactacgcacctttctgatatctttgttttttttgatacgcttttcattttaacctgaaaacgtcaccatcataaagttaaaattccaaactccaaacttttctcttctcttaaaaaaatctttatttatgaggagctgaatacatgtgtaaaaagtatcgttcaaccttacttcaatgttatttttaattcagaagacatggattatatttttcttatctatcttacaagcgctaactcttttgctgctcaaaagtggactgaaacacatgtcgatgaagtgttagctatttttaaaagtcttcctaaattccaaatgctactacaacctttgaaagaagctcttccatactctgacacctactacgatgagctagtgaaagtcactatttacttttctcgaaacttcatagttggtctgaatcaattaattcctgaaacacttagttttccttcaacattctatcctggaaataatcctaaactaatatccattatcgaaccaatagtcactcattggctaactgaaattggagaatcaaagttcaaaaaaacgcacttcttcttgctctgtgctcaccttgaaagagtaataaagaatagcatgcctcctataaatattgtgttgctgacaactgattttattaataatgaaattttaaaagactatattttgcaatccctttcaacagataaaattagatttcattcctattacttattgacagataatattagtcaaatatcgaccttaaaacccgatttaattatcactaatcgaaaactgtttacctatgttacaaaggaactagctacaaatagtttagtcgctcatattgattacaacgatacaccctctcaaatcagtaatatccaaactattatttctaatattaaagaagaaaaatatcgaaaaatctttgataaaatataacatcacctactgtattcttttgatttcaattattaataaaacgactagagcacttcattaactactctagtcgttttattaattctgttcatcgtattaatcgattgcttttagttctaagataacatctcggatttgtgcagctagctcaaagtccaataattcagctgcttcttgcatttgctgttgaagagctttaatttcagcttgcctttcttttttagataaactactgtaatcgacaactttttcaggcttatcgctgtcattacttttagtaatagcaattaaatcacggatttcttttttaattgtttgtggcacaattccatgcttttcattataatccatttgtaaacgacgacggcgagcggtttcatccatagctctttgcatagaatctgttattttatcagcatacataataacatgaccattactgttacgtgctgcacgtccgattgtttggataagaccacgctcattacgaaggaaaccttccttatcagcatctaagattgcaacaagggaaacctcaggaacatctattccttcacgtaagagattaataccaattaaaacatcaaacacaccaagtcgtaaatcacgaataatctctgtacgttctaaggttttaatatcgctgtgcatatacttaactttaactcccatttctttgagataatctgttaagtcttctgccatacgctttgtcaatgttgtaataaaggtacgctcacctttttcagtcctcaaattgatttcaccaagcaagtcatccatctgccccatacttggtctaacttcaacttctggatcaagaagtcctgttggccggataatttgctcaacaactgtatctgtttgctccatttcatagtctcctggcgttgcagatacatagacaatttgatggacatggctttcgaattcttcacgacgaagtggacggttatctaaggcagatggtaaacggaaaccgtaattaaccaacatttctttacgcgaacggtctccattatacatccctttgatttgccccattgtcatgtgactctcatcaatcataatcaaaaaatcttctgggaagaaatctaacaaagtaaaaggtggctcaccttcacttctaccatccatgtgacgtgagtagttctcaacaccatttgtatatcccatttcacgaagcatttcaatatcatattctgtcctttgtcgaatacgttgcgcttcaatcaatttcccttctttttcaaaaagttctacttgattttccatttcagcttgtatttttgaaatagcttcttccatatgttcatcatttgtcataaagtgtgttgctgggaaaatagctaaatgttccacttctcctagcacacgccctgttaacgattctatttctcttatacgatcaatttcatcaccaaaaaattcaattcgaaaggcatgctcatcacgactcgcaggaaaaacttctacaacatcgccacgaacgcgaaattttccacgttgaaaatcaatatcgttacgctcaaattgaatatcaacgagattgttcaataactgatcacgtgaaatttcttgacctggcctaaggctaacaacactgtctgcatactctttaggagaacctaaaccgtaaatacaagaaacagatgctacaacaataacgtcatttctttctaataacgaagaagtcgctgagtgacgtaatttgtcaatttcgtcattgactgaactatctttttcaatataagtatccgaagaaggcacataagcttctggttgataataatcataatatgaaacaaagtactctacggcattgtcaggaaaaaattctttaaactctccataaagttgacctgctaaggttttattatgtgcaatcaccaaggttggcttgttaacttgggcgataacttggctcattgtgtaggttttaccagtaccagtagcaccttttaaaatctgagctttttctcctccttcaatattgtcaaccaacgtttcaatagcttgaggttgatctcccgaagggctatatttggaaactaatttaaatcggttagtatcttttctatctatcatttctttacctcgattactttattttaacatagaaaaaagaaaaagactgagctgcaacactcaatctgtttcttcagtcttaattagccatagaaggtatataattgctgctaagagaacaaaaatagaaatcaaacttccttctattccgaatgcaccacctgatatccagtccggtgcgttttctttaacggtaaaatgcaaaagagatgctcctgctttctgaccacttacggcaataccatagagattaccttggctaaaattccaagctccatgtaaggctgcaacactccaaatattaccacttttaatcatatacaaggacattaaaactcccgaacatataatacttacaatagaaagaaaagtgacatgggcatttaccaagtgcaaaatgccaaataaagtggatgagacccctatggcaacagctaaatgaaaacgatgattaattagaggaagaagccaccctcgtgttagcaattcttccgtaccgctttgaataagccaaaaaggaaggagagttacaacatagaaaatcgttgccttagaaacatcatagctatgaaagtcaagtcctcccaatatataagcagtgatgacagaaattgaaaatagaataaaacctatactccagccttttataagtgaccacagagttcttttaaactttgtagaaaaccccaattctgaaaaaggtcttttttctacgaattttacccagataagcaaaaggaatgctgaaaaactaaaggttcctaattctccatagatattattaaataaattaataaactcaaaaaaagtataggaagaaaacttatagagtacagaagacactagaacaattcccacaccacctagagttagaccaacgaaaaaaaataggtataccataaaacaagcaaataacaataatagccatgacggccagtttttatagacagcgaactgactatttaaaatccttttattcataataatcctaaatcctttttgtgtgataacactagaacgattatatcataatactaactaaagatatatataaaattaacataacatacatgttacgttttctaacatagaaatgacattttgttgctctatcttatttattttgatataataaaacacatatttataaaaaggagatttacatgaagcacaagttaaaagcttttacgcttgctttactctcaatattctttgtgtttggtggaaaggtcagtgcagagactgtgaatattgtttctgatacagcatacgctccattcgaatttaaagattctgatcaaacttataaaggaatcgatgttgacatcgttaacgaagtcgctaagcgtgctggctggaatgttaacatgacgtacccaggttttgatgccgcagttaacgctgttcaatctggacaggcagacgcgctaatggccggaactactgttactgaagcacgtaaaaaagtctttaatttctcagatacttattacgatacttccgttattctttatactaaaaataataataaagtcacaaactacaaacaactaaaaggaaaagtagtcggtgtaaaaaatggaacagctgctcaaagcttcttagaggaaaataaatctaaatacggctataaagttaaaacatttgatacaagtgacctaatgaataacagccttgattctggttctatttacgccgctatggacgatcaaccagttgtgcaatttgcgataaatcaaggaaaagcttacgccattaacatggaaggcgaggcagttggtagctttgcatttgctgtcaaaaaaggtagtggacacgataacctaattaaagaatttaacacagcttttgcacaaatgaaatcagatggcacttataatgacatcatggataaatggcttgggaaagacgctacaaaaacaagcggcaaagcaacaggtaatgccaatgaaaaagcaactcctgtaaagccaagttataaaattgtttctgattcttcattcgcaccattcgaatatcaaaacggtaaagggaaatatactggttttgatatggaattaatcaagaaaattgctaaacagcaaggttttaaacttgatatctcaaatccaggttttgatgccgctttaaatgctgtccaatctggacaagctgacggtgttattgcaggagctacaatcacagaagcacgccaaaaaatctttgatttttctgatccttattacacatctagcgttatcttagcggttaaaaaaggaagcaatgtcaaatcataccaagatttaaaaggaaaaacagttggtgctaaaaatggtactgcctcatatacttggttatcagaccacgcagataagtacaactatcatgttaaagcatttgatgaagcatctacaatgtatgatagtatgaactcaggttcaattgatgctctaatggatgacgaagcagttcttgcttacgctattaatcaaggtcgtaaatttgaaacacctatcaaaggtgaaaaatcaggcgatatcggatttgcagtgaaaaaaggggcaaatccagaattaattaaaatgtttaacaacggtcttgcttcactcaaaaaatcgggtgagtacgataaacttgttaaaaaatacctttccacagccagcacctcttcaaacgataaagctgctaaacctgtagatgaatcaactattttagggttaatttctaataactacaaacaattgctatctggtattggaactactttaagtttaactcttatctcatttgcgattgctatggttattggtattatctttggtatgatgagcgtatcaccaagtaatactctccgcacaatttcaatgatttttgttgatattgtccgtggtattccactcatgattgtggccgcttttattttctggggtattcctaatttaatcgaaagcatcacaggtcaccaaagtccaattaatgacttcgttgctgctactatcgctctttctttaaatggtggtgcgtacattgctgaaattgtacgtggtggtattgaagctgttccttctggtcaaatggaagcaagtcgtagtttaggtatttcttacggcaaaactatgcaaaaggttatcttgcctcaagcagtacgccttatgttaccaaactttatcaaccaatttgtcatctcattaaaggatacaacaattgtatcagcaatcggacttgtggaactcttccaaactggtaaaatcataattgcacgtaactatcaatcattccgtatgtatgctatccttgcaattatgtatcttgtaatcattacccttctcacccgtctagcaaaacgtttagaaaagaggcttaaataatggcagaattaaaaattgatgtccaagatttacacaagtcgtatgggcaaaatgaagttttaaaaggtattgatgctaaattttatgaaggtgatgttgtttgtattattggaccttctggttcaggaaaatcaactttccttcgcacattgaacttacttgaatcaatcacaagtggaaaagttgttgtggacggctttgagttatcaaacccaaaaacagacatagacaaagcacgtgaaaatatcggaatggtatttcaacacttcaatcttttcccacatatgtcagttcttgaaaacatcacttttgctcctatagaacttggtaaagaatctaaagaagcagctgaaaagcatgggatggaattacttgaaaaagttggtttagccgataaagctaatgccaaaccagatagtttatctggaggacaaaaacaacgtgtagctatcgcaagaagcttagcgatgaatccagatatcttactttttgacgaaccaacttctgcacttgatccagaaatggttggagatgttctcaatgttatgaaagatttagctgaacaaggtatgactatgttaattgtgacacacgaaatgggatttgctcgtcaagttgccaatcgtgttatctttacagatggtggtcgtttcctcgaagatgggacacctgagcaaatctttgatacacctcaacacccacgtctccaagacttccttaataaagttttaaacgtttaataaaaaagatgacttcgtgtcatctttttttatatcctaatcacaaacaaattataataggataagttttcttctaaaattagcaaaacatcagctagaatgtttgaataatgttgcacaagggctttcagtatgataatatagcagtatgaaagactatattaacagaatattgcactttattaaagaacatatgacttatcatgtcaactttatagatgactttttagatattaaatgggaaaaggtgagtaacatccatttaaggttttggacaactattattgcttatttagttatttttatcttaagtatctctaccgtaattcttaaccttgtacttctttttcaaggattcttaacgcaaaaccctattatttacttactattttttataactttagtttgtgctttttattttgcttataaatttattacttatactccaaccattgtaaaaaatgctcttcagtatatcaaaaagctcaaaaacgtttaaaataataaagtaatctgtaccttaacactctatcaattatgttttagagtcttttttcataccaaaataactaaaaaggatagttacttaactatcctttttcttttgctaatttttcgcgttctaaacgaagtttacgattaggatttaatgtgttaaagagttcttctaatttttcagcattccagacatcggccgctgaaacaaaattcccatctttatcacgaaatgatatcggtttatctcccataaaaaacctccaatcaagtactgcattaatctacaaattcaaattcgaagttacctatacgaacaatatctccatccttagctccgcgctctcgaagggcttcatcaacgcccataccacgtaactgacgagcaaatttcattattgattcatcgcgttccatatttgtcataacaaagagtttttctagcttatcaccatacaatacccacgttgcatcatcatcacgtgtaatctcaaatggacgttcatcttcgttaaatccatagtatgcttcatcttcttgcatgtcagtttcgtcataaagaagaaactcttctgtattggctaataattcagccgtcgcatccataaggttttctagtccttgatgtgctaaacttgaaattggaaaaatcataggcatgtcatcaaactcatcatagtttgctgctaatttttctttgaatgctgccaaattctcttctgaatcaggcatgtccattttattggcaacaataatttgcggacgttccatcaatcgaagattgtaagtttccaactcattattaattgaaacatagtcatcgtaagggtctcgtccttcacttgccgacatatcaataacatgtagaataacacgtgtacgctcaatatgtctaagaaactgagttcctaatccgacaccttgactagccccttcaatcaaaccaggaagatcagccattgcaaagctatcacctgattttgtacgaaccatccctaaattagggacaattgtcgtaaaatgataggcaccaattttaggctttgctgctgaaacaacactaagtagcgtcgacttcccaactgatgggaaaccaacgagaccaacatcagccaaaatttttaattctaattgtaattcacgttcttcaccaggctccccattttcagcaatttcaggagctggattacgtggggttgcaaagcgaatatttccacgaccaccgcggccacctctggctacaacgaattcctgatcatgctccacaaggtcggtaataaccttacctgtagtagcatcacgaacagttgttccaggtggtaatgacacaataaggtcttctgcacctcgaccgtgcatacctttagtcatccctttttcaccagcttttgctttaaaattacggttatatcgaaaatccatcaaagttcgtaaaccttcgtttactttaaaaatgaccgatccgcctttaccgccatcaccgccccacgggcctccattggggacatatttctcacggcgaaaagcaaccatgccatcaccaccgcgacctgccttaacactaattttggcagtatctaaaaacatactcatttctaaaattcctattctttattctattcagtataaaaaaacgctttacagcgtttctcattacatgattgcactaatagcaccaaataccaaaccaccaactgttactagtaccatcaaaataacaacaaaaagagttagtttttcaaacccagttttttttcgttgtccgttatctccaaaagccactcatgtcacctcatttactgaatatatagttaagtctatattaacacgaaacgtcttatttcgcaaactacaaaccgttagcttaaatatatctttattaaatcaatatatctttattaaatcgcttccatatttccttgtgctttataagagtttatgataaattataaaaaatagtaaatttaaaggagctagtatggttttacaagatttcgacaaccttttaaaaaaatatgcccaattaattatttctaaaggtttaaatgtccaaaaagggcacactctcgctttaacaatcgatgtggaacaagtccacttagcaaggcttttaactgaagccgcttatgaaaagggagcaagtgaagttattgttgattatacagatgattttatcacgcgccagcgactacttcatgcttcagacgaagttctcacgaatgttccacagtataccgttgataaatctttagcactattaaataagaaggctagtcgattagttgtgaaatcttctaaccctaacgctttcgctactgttgatcctaaacgtttatctgaaacaactagagcaaccgctattgccttagaggaacaaagtagagcaatacaagctaataaagtatcttggaacgtggctgcagctgctggtagagaatgggctgcacttgtcttcccagaattaaaaacaagcgaccaacaagttgatgctctttgggataccattttcaaattaaatcgtatttatgaagatgatcctattgctgcttgggacgcacatgaagctaaattattagaaaaagctactagactaaatcaagaacaatttgatgctcttcattataccgcaccaggtacagatttaacgcttggtatgcctaaaaatcatatttgggaggcagccggtagtctcaacgctcagggagagacttttatcgctaatatgcctactgaagaaatcttttcagcacctgattaccgtcgtgcagatgggtatgtgacaagtacaaaacctctcagttatgctggcgttattatcgaaaatatgacatttacctttaaagacggtaaaattatcaatgtcactgcagaaaaagggcaagaaacagtccaacgcttaatcgaggaaaatgatggggcaagatcgcttggggaagttgcacttgtcccacataaaacaccaatttcactatctggactgattttctttaatactttattcgatgaaaatgcctctaatcacctcgctattggaactgcatatgccttcaatgtagaaggaggaacagaaatgacaagtcaagaattggatgaagctggtttaaatcgttcttcaacacatgttgattttatgattggttcagaacaaatggatattgatggtattcgtgcagatggaactgctgtcccaatctttagaaatggcgaatgggctatttaaatataaaaaggaggttagtcctcctttttatatttaataaagtttcattttcttattgtaaaaacttaatgataacagaataatccctcccgtagatgctattacagtatctgagtggctatctcctgttttaggaagttcctttttaggcttactgtggccttttttcccatcatttgcttttgaagatgatgattcatcgcgatccacttcttcttgatcactacttgctttactaaaattcttaatactatcttctgaaattaatacttttgttccactagaaatatccttattattgccaatttctgtcttcgttctaccatcaggcttgttctcttcactaggtgagggttgcgatggttctgttgtaggtggattagttgacggatttgtttctggttcacttgatgaactcgattcattttcagaagaagaaccagtactagactggtctagttcatctgatcttttctcctcagataaggtcgtagtcacgacactcgtgtcagtattcttatcacttgtatcagcataaccgattgatgaataagtagcacatgttaagacagtaagtgctaccatcgttaaaatcttatttttcactttcatattatttcctattttataattccttacatcttcattataatttattacaacataaaaatcgaaaatatgatactaaaaagtgaaaaataggaattattttacattacaatcaacttttctgattcttttttgttacaaagctaaaacaagctaataaaagggttactactaaaactggagataggcttgattctgtatcacctgttttaggaagtgctttttgatatgccattacggatggtttatttttaacagacgatttcatccattttttagagatagatacttgagtaacttgtgaattttcttctaaatttactaatgatgaatgagctttaaagagggagttagtaggctgtattaggccagtagatggtttcacttctttatctattattctttgccatttaacattaaaaccatgatgtttttcaaagaaagttgcaaatttaattaataccatatcatagtttgcacctgccattaacatcgtccctatgggtaaaccagactcagataagtaagtcgggatactgatagctgggagtcctgtcatattagcaatttgtgtaaaaggtgttctacgcaacataggctcccactggcgattaaagagagcaattctttcttcttggctcaagttttccatattataaatcgctcttttatcttcctctgttacatatggatctgtatttagaggggctaaacttgcggtcgttggcgataagaaaataggaaattgcttgtgaagcttctccattgccttacgataatcatccatatgtttttgggcttccataatagatttcttaagttcagccttatctgaattttgataaataacatgaactgcccaagtaataggatcaacgtcttctttagtaaaaccatgtttttttaagtctttttcaattgttgaaaaagctcctcccatgccaatagccaaggttgaataatcacgcattaatgctctaccatcaattggtaagtctatctctgttactttgaatccttgttttcttaagaatgtgacgttgtccataatagcgtttttagcatcttgactaacttctgttcccattggtgatttcaaagtataagcaattggtaaagattttaaatcattaactgatactagcgtttgatcgcttttctttagataagttaataatgtttctgcgtctctagatgacttagttaatggaaaatgaactgctgtactatacgaatctggcttttcattactcaccaatcctcttgttggttttaaacctaccaagcccgtccaagaagatggaatacggatagaaccaccagcatcactaccgctagcaattggcgtcattccgctagcaatggctgctgcacttccaccagaagagccaccagcattatgagcaagatcccaaggattatgcgttagaccgtataatttagaatctgttatattacgccacccatactctggaaagttcgtttgtcctaaaataataaatcctaaatctttatattttttgacatagctactgtcaaatgtgctaatttttccatctgcatagatcaagccattattggtttcaccacctttaatactgtgccctaaccccttgactaacaagggaacacctaaaaacggctgattggtatctttaagttttctagcctcttcaatagcttcttggcgtctagtagtaatgactgcatttaaagatgggttttctttagcaataatatcgtatgccatattaacgagttcctcactagtaacttgaccacttctcaccatgttggctaaatcttgaccatctttttgtttgtaagtctcttcagttaacttagtagaagtactctcaacgacaggacttgattgagttgtttttaaagcatctggagctgaaatatgatgaggcgtgtcaactgttgtaagcgccgcagaattatctggttttacttgacctattacagattgtcctgattctgatacaaattttgcggtaggattactgtcattagtttgaacgatagtatttgtagtaggaactactgaagcacttgtctcagtactattagcatagatactgctagtattcattgcagcagctaacgttaaaaccgtcaccgtattaagaataaagtatttacgtttcatttgatcttccaatctaaaaaagtatacgtttacattataatctaagtgttatcaaattgctaaaatattaactgttgttttatattattgcatatatttttctaatttttctatttcttttattgttagccgtctccattgtccactttctagctgtttatctaattgtagatttcccatccttagacgctttagctctaagacttccttaccacacgcagcaaccatacgtttaacttgatggaattttccttccttaatggtgattttaacaagactctgcttcttcacctgatttacttccacaatttctaataatgctggtaaacaagtaaaatctttcagaataatccctttatcaaatgccaaaatatcgtcttctgtcattatccctgagatttttacctcatagcatttatcaacgtgttttttaggtgataacattttatgcgctaattccccattattagttaataacaaaaggcctgttgtatcaatatctaaacgccccactgggaaaacagctttatctcgagcagttttgtctagcaaatctaacacggttttatgcgaaggatcatccgttgctgatataacacctttgggtttatgaagcatataataaacaaacttttcatatgacactagagttccattatatttaatctcatctctatattcatctacctgtacttttggagatgtctcgctattaccattaacactaatctgcttttttttcaatattaatttgacttgagtacgtgaaccaagtccgcattctactaaaaatttatcaagtctcatttagatgttataacctctttcgataatgatatattgtaaaggatttttccatactcatcctttattactacttttctagtaatactatcattaatatattctcctcgtcaatggaggtcttaatggttttcttaactttaaggaactatcccacataaaaaagatggaaatacatttccatcttttcttattaaaatgagacattatctggatctttgggtttaatacctgaatctagttgtattaaggtagcaatatcatcttcgtttaattgaaaatcaaaaatatcaaggtttgcttcaatatttttgggagtcgctgacttaggtaatggtaaaaagccattatcaagtgaccagcgaagagctacttgcgcaactgatttaccatatttttcagcaatagcttttatagattcattttcaaaaatagcacctgttccaaatggactgtaagcttctaataagatatcatttcctttacagaagcgaaccaaatcctcttgagcacaacctggtgctaggataatttgattaaccataggttttatttcggcagtttcaaataaagcctctaagtgatgtttcatgaaattcgaaacaccaatagcttttacctttccttctttataagcttcttccatcgctttccaagtgcctgcattcccagctttccacgcatcattttcacgaagagcttttggatttggccaatgaatcaaaagaagatcaatataatcaacacctaatttctgcagagattcatcaatagaagctttggctaaatgatagtcatgtttgtcattccaaatcttagttgtcaaaaagatactttctcttgccaaaccactgtctcttatagcacgtccaacactatgttcattaccataaatctgagcagtatcaatatgagtataaccaacttttaaagcatgagtcactgccttataagcttcttcaccttcagttagttgccatgtcccaaaaccaattttaggaatgttaagagtattcgataaagtatatgtttccataacaatctccttttctatgtgacaaaaatgaatttcatagtgaaaaacatctattttaaacatctaaatgatagtttgatatatggtattatcccctccttatgtaaaattatataactttcttcatcaaaaccctatcattttgttcattccctttatttttctgacagtcattagaattttgtagctctactttgctacgatatcgcctgctgagattttttctaaattgtgatatgatagcattaataacaggaggatctaaaatgacaaaagaagatatcaaaaaacaagttcgaagagcttttgattttcgtatggcgattcgtgtttataataataatgatattcctaaagaagatatggagtatattttagatactgcttggttgagtccttcttcagtcggtttagaaggctggcgatttttggtactagatagacaaacaattgcaaaatttcgagataaacttaaggaagttgcttggggagcacaatatcaactagatactgctagtcactttgttttactactagctgaaaaaggtgcttattataacgctgatagcatgattaacagtctcattcgacgtggtctaggtgatccagctgcccttgagagtaggatacctctctacaaatccttccaagaaaacgatatgaaaattgattctgaacgttctctttgggattggacagcaaaacaaacttatatcgcactcggtaatatgatgacggctgctgctatgatcggcgtagattcatgcccaattgaaggatttgactatgaaaaggtcaataatatccttagtaaagaaggattaatagacgataagaaagaagctatttcttgtatggtttcatttggttatcgtttgcgtgaacctaaacattcccgtgctaggaaagaacgccaagaagtcattacttgggttgagtaaatagacagcctaatttataatcaatatttttgaaaagacaattttattttgacataatacgtctaataaagaaataggagagagactatgccatttttacatacttgtattcgcgttaaagatttggacgcctcaattgctttttatcaagaagcacttggttttaaggaagttcgtcgtaatgactttcctgaaaatcaatttactttagtctatatggccctagaggacgaccctagttacgaattagagttaacctataactatgatcacgaagcttatgatttaggaaatgggtatggtcatattgctgttggtgtagacgatttggaaactacttatgatgcccatcagaaagcaggttactctgtaacaaaaatttctggattaccaggtaaacctaatatgttctactttattcaagatccagatggctataaaattgaagttattcgactcagtcaatttaaagctgactaataacatctcatcatattaagttaaggactgaggcaaaaacctagtcctttttatgattaccttataatctttctattttttcccatattatgttaaaatttaagcaagaatgatacggagaattacaaatggctttattatcagttattgtcccttgttataatgaacaagagactgtctcaacttttttaacagaaatcaaaaaagttgaatccgaaatggctcgttacacccattttgaatacattttcgtaaacgatggttctactgatcgtacactcgaacttcttaagaaagcagctaaacaatttgacaatgttcattacctttcattttcacgccattttggtaaagatgctgctttattggctggtttagaacatactactggtgattttatcactgttatggatgttgacttgcaagatccacccactttattaccagaaatgtacctaaaacttcaagaaggttatgatattgtcgctacaaggcgaaaagatcgtaaaggggagccgttgatacgctctctttttgccaagcttttttataaattaatcaatcaagtgtcagatactaaaatggttgatggtgcgcgtgattttcgtctcatgacaaaacaagttgttgacagtattctcgagctaaatgaagtgaatcgcttctcaaaagggattttttcctggattggatatgatgtcgcttatattagttatgagaatcgagaacgaattgcgggtaagacctcatggagtttctttaatctcttaaaatactctctagacggtttcatcaacttctcagaaattccattagctatagctacctggattggaacccttagttcagtactatcacttttagctatcatttttattataattcgaaaattactatttggggatcccgtttcaggttgggcaagcacagttaccattgtactttttatgggtggtattcagttattgtcgctaggaattataggcaaatacatctctaagattttcctagaaactaaaaaacgcccagtctatattgtcaaggaagagggatgaattgaaatctcttagctcacttagctaggagattttatcatagaaaaatattgtatagtaattattgcgaattttgcaaaaaaattatataataaaggagtttttcaaaaatagatggagtatttataatgtcaaaaaataataatgaccacactcaaaaatctgagaatggtatggtacgcggcctagaaaatcgtcacgtacagttaattgcgattgcagggacaatcggaactgggctttttcttggtgcaggtcgttcaattagcctgacgggtccttcaatagttcttgtctatgctatcactggcgctttcatgttcttcatgatgcgtgctattggagagatgctttatcaagatccaaatcagcatacttttattaatttcattaccaaatatttaggacccggttggggatttttctcaacactttcttattggatttccctaatatttatcggtatggcagagattacagccgtaggagagtatgttcaattttggttccctgaatggccatcctggattatccaaattgtttttttagctatcctaagttctatcaacttaattgctgtaaaagcattcggagaaaccgagttttggtttgctatgataaaagttattgcaattcttggtttaatagcaaccggtatctttatggtattgacaaactttgacaccggtcacggataccatgcttcaatctcaaatatcaccaatcattttgaatggttccctaaaggtaaattgaatttcttcatggctttccaaatggtattctttgcttatttagctattgaatttgtcggagtaacaacttctgaaacagctaatccacgtaaagttttaccaaaagcaatccaagaaattccgatgcgtattattttattctacgcaggttcattattagcaattatggccatcttcccatggcaacagttaccagttaatgagtcacctttcgttacagtattcaaactagctgggattaagtgggctgccgctttgattaactttgttgtcctaacgtctgcagcatctgctcttaattctactttgtactcaacagggcgtcatttattccaattggctaatgaatcaccaaatgctcttacaaaagcgttaaaattagaccaattatctcgtcaaagcgttccaagtcgagctattattgcatcagctgtaatcgttggagcttcagcacttatcagtgttttacctggtatttcagatgccttctccttaattactgcatcatcttctggtgtttacatttctatctatgttcttattatgattgcacattggaaatatcgtaaatcacctgattttatggaagatggttataaaatgcctgcctacaaaatcctttcaccaatcacacttctcttcttcctctttgtattcgtttctctcttcttgcaagattcaacatacatcggggctattggagcaaccatctggattattggatttggtttatatagtcacttcaaacataaatcacattaagtctatattattagtgaagttggtcaatcaacttcacttttttcgtccaaaaaaggttaggcaattgcctaaccttttgataatcatcgtgaattatagttttttaactgacgggcaatatcacggttttgctcacgacgtttgatagactctcgcttatcataatcatgttttccttttgccaaacccaatagaactttagcaaaaccatcttttaagtaaacttttagaggtaccagagtcataccagtccctttcagttcatttgatattttttcaatctcacgtttttttagtaataactttcgtgtacgatcaggatcttgattccatatgttaccttgatcatatggtgtaatatgaacattaatcaaccacgcttcaccattttttatttgtgcatatccatctttcaatgtaatacgcgctgcgcggacacttttgatttctgttcctgtcaaaacaattcctgcttctattgtttcaacgatagtatagtcgtgatgcgcttttttattttgtgctacaacgtttccttgacctttaaccatacttaacctttcttagatttccgtttctgacctttcttagcaacgcctttatagaaaggttttttcgtttttttcttggttgaacctgttgttctatcgtctttatgatgatgtgatttgctatccgagttccttttgggttttcgagatgcttttttcttagatgtatttttattcttattatcacgatcagaaattctatgctgatgttctcgtttagaacttctattaggacgaccctcacgcgaacttttacttaccttttcaacaatatcaaaatctgatggtaaataatcaaaatcgatatcaccagtttccttatcagaacgaatcaacttaaccttaatttgttgaccaacacggaaaactttcccagatttctcaccttgaagcgtcagcgtacgttcattaaagtgataatattcaggcaaggtcgttacgtgaatcaatccttcaatagtatttggtaattctacaaacataccaaatttaacaacgcttgcaaccacaccttcaaattcctcaccaacatattcttccatatattcggctttcttcattgcctctacaatacgttcagcatcaatggcacgtctctcaagactagacgtttgagttgcaatttctgggataaggttagcaaaatgatcagctttatccatcgctttatcatcataatcacgaatcatacgatgaactaacaagtctggataacgtcgaatggggctagtaaagtgagtgtaatattccgcagcaagtccataatgtccatggttgtgttcagaatatctagcttgttgcatcgagcgcaataacatcatagataacacttcacttcctggctgcccttgtacttttttcataaagtcctgtaaagcagattgggtgattttagttgctgttccttgaatctgaacaccgaaaacagaagcataatcgatgaatttttgtaatttttcagctttaggctcttcgtgtatacgataaataaatggcagttttagacgagcataatgttcagcaaccgtttcatttgccgccaacataaatgactcaatcatgcgttcagcaatgcctctgttgcgaataacaatatcaactggcattcccttatcattaaccataatttttgcttcagatgtgtcaaaattcagcgctccacgacgcgtacgcatagcttccaaagtatggtgtaaagtgaccatatgctgtactgaggacacaatagactcatattctgagcagatttcctcatcgccagcaataatatcatttacagcggtataagtcatacgataagtggtattaatcactgactgtgtaatttgatgattaacaactctcccattttggtcaatttccataatacaagactgcgttaaacgatcaagatttggatttaatgaacatataccgttagatagacgctctggtaacattggtacaacgcgatctgtgacatatacggacgtaccacgactaagtgcttcacgatttaaggcagagccttcagtaacgtagtatgatacatctgcgatatgaactccaagttcaaaatgaccattatccagtaatttaatatgcacagcatcgtctaaatctttggcgtccgctccatcaatagtgaaagtgacctcttgacgtaaatcaacacgcccaattaaatctttctccgttggagcatctgggatagcattggcttctgcaataacgtcctcaggaaattctgagacgatatccatactttccaagacttctaaaacatcaataccaacatctccttgatgtccaacgatatcacgaacacttgctacgaagtaatcatgtcctcgtgtcggatatttatcaatatctactttgataatttctgttccgtctaaaacgaccggttctttgcgtatataaatcttttgattgattttttgatttttcgatttgatatatcctgcgtatttagggcgctcatcgtctaagacaaacttaccaacaagcgtctttaaactacgttcaacaatattaacaacacgcgcttctgctgcagtcccgttaagacggtccgctggtttctttacaacagcttctaccgtgtcaccatcaatagcataagcaatatcgttttttccgataaacatatcatcttcgtcttggtcaatactaagaaaaccaaatcctgctttatttgctctaaaaagaccccttactgtgatttcctttttcttagcttctttcttttgaagagaaagacttccattatcgtcaaatcttaattgcctgtggctctccaaatttgagattgttttgattaattttggaaatgcttttgcgcctgccatatctagggcagcagctaaatcattaacgctggttttaccgtgttcttccaaatattttataattttttctttcattatttccttttctagtaactttagtcactttattattactctacaaccattctactaacaaaaagtgaggttgggctatcccccatcctcacttatctgtatttagctatcattaatgacttgataaaatagataatactaagccgattagtagccagaaaaagactaaaacacctgtaaaacgttgcataaaagcttcaaatcctcgagctttactacgttcaaaaagggcttcagaaccgctactatcaaaaacattactacttggattcttttgtggttgcatgaaaattgagataatcaataatactgataaaacaagtagaatggtgagtaataggttatacatgttaattcctccactatggtcaaagtacattctaacataaaacttattaagattcaatatgtagtgttacttttctctcctttgggcaatactttggaacctcgattttatcgggatgattacttttattcttactggttaaataattcttactaccacaagagctacactttaaattaattttaactctcacacaatttccttaactctaatatattttctaaaattaataaaacaccaaacaaaattagctaaaacgatgaagctagtcacaaagaaaacccatcggaatcctaaatgaatagaaactgctgaaccgacaaaaggacctaatacttgtcctaaattgctaaacatttggttataactgaaaatccttgataaaccttgtcttggagcaattttagtcaagattgaattaatactcggcatcaaggcacctgttccaaaaccatacaggaatctaataacccctagctgtaatgaagtctgtgccaatgaacataagacatacatgaggaaactatacagtagagctaataatagcaaacgatgattgcctatgcgatccccgattcttcctagctttggactactcagaatactagagaatcccataccagaaacaattaatccggaaacaaacatcaagttttcagtctgtcctaaatgacgaatgtaaagtgttaaaataggtgcaattgattgtgcagaaatttgaataatcatgcttgttacaaacagccctattaaaatttgtaagcttttaacgcttttgaacacttctgtagttggcatggtttcttcgttagaaatgggtttgaaatcttcctttaccataaaaatggtcattaaagtagatattaacaatatggttcccactaataaaaaaacttccctaataccaaaccactctgctaaaagtccccctaaaagtggaccaattaacatacctccagtcactcctgtcgctaaggttcctaaggcatatcctgattcctcttgaggagcttgacttgctatcaaagctgtagagttaggtacatagcctgcaaaaatgccgtttaatatacgtaaaatcagaagtcctgtaacactatgaatgaaagcaagacctcccatagtaaaagtcatcatcaaccctgctcttaccatcatcggttttctaccatatttatcagctaagcgcccccataatggggcaactaaagctgaagacaaggctgataaggatactgataggcctgcataccactctactttgttgctaggtgctcctaattgttctacatataataccataaaaggcataacaagtgaaaagcttgccccagtaaaaaaattaccgagccaagccacttttaaattttgcttccagttaaccgtttcaactgagataaaacatcatcttctttctaaacttttctaccactaactatcttagcagttttattgagatttaacatctatttgagatgttatttccattataatttcctttatgtaactaaacctatgttatcacatgcctctgttattataccacaattaaaattaactttttaaacggaaagtttttggagcaaatactacaactgctaaatagccaataattaaaataacaactataattcctaggcttactaataatattggcatcgttatagatttagtaaaggtaaatagcttatatcccatatagtatataataaaggttaaaatattatacatagcactctttgattttaatccttctgtaaaaggctgtaagaagaaataaagatacaaaaagtaaaaactaaataaaatcattgatatagcttgtgtaattactaatatgataatctgatcaatcttaggggtgaaaaaattaaaataataggttccaaaacatatgtttaaagctacaaaaatggggaaattaagttttatactataaaggaaacgtatttttaaggttgctaagatattttctctttcacgatagaaattatatcttaataatggacgatccaaatgatagaaacaaaattttgaataggattcaccgatatatattagatatcctggaactgcactcaaaaataggaattttgaaaaactatgctcattcatcggaatatttatcttttctttaaaaaatagcaggaaaaggagttctattccaaacagaacacttaaaacagctaaacgtaccaaaattttcctttgcaagtatatactcatccgttttaaaaagatagcgtttaaatatgaaatacctgataaattttcaaatagcaggggagaaagttcactgacatttatatccctatctttcatttcaatcccaagcagctctatattatcaatctttgcaattttctccttcatcgtctcatgcgttagggtaaggtaggtcaagtggttaagtttagaataagtttttaatcgatagtaactaactaaccatatgataagtcctgcaataccggtgtaccatgaaaaaaatggatatggagagaactgtttgccaagaagaaggaaaaagagagaaaggaagactcctataccaatccctaagtaaaataaaatatttagtaaagactctggattctcttggtctttacctctaccatataaaggtaaacagagcaccttgattccaaggcgactacctgctaaaaataaagcaaaagtcaaaccatgccaaaaagcaaagtgatttaaatggaaaaatatgccaaagctcaaacttctaaaaaatagttcactactggcttctaaaagttcagcggattggaaatacctcgatggctcaattctgaaaaggcgaatcatatgagtttgttgcatatcattaggttctataagttttatatagaaatttatgacaattaaaagagaggtaatcaccatcaatgttaaagttagggtaaaaccttcttgcggtaaaatatttaactgcttcatgccacttctaacaaaaaatgataaaacataacaatatagtacgtaacctatggaacgaccaaaacctcttaagaaaaagaaaatgatacgaataaatagtactacaccttttatatcatcggttttaaaccatcggttagggatttttcttcccaaccaggggattttctgaaggtaatataaaaaactattataagctctagcactatcaatctgtaatatagaccatattaatgctttacttgtcatattcatctcccttcaacacttgaagaagacgctcttcgaattgttcatgtttacgatcaatatctaatgtttggagttttcctttgtctaatacagccacaatatcacatagatcttctgctaaggccattatatgagttgataatataataatatgatcctcacttaattccaacaaaaggcgttttattgcaatacttgatacaacatcaactgcagtcagtggctcatctagtaaaattacttttggcttagaaatcatcaggcaaattaatgagagcttactcttcattccatcagaatatcctttgataattctatgacgctctgtttgtcctatttccataaaatctaaataatcatctattgtcattaaatcatctgaaggatgtaaatccatgtaaaattttacaaattcataccctgttaaaaattctggaaggtagttttcggaataaacaataccaatatccttatcggtaagaggatactcgtgattatccttcaataaacaaatggtcccgttgtcagctgcaagatccccataaagtatattaaataaagttgttttcccagcaccattcctacctaagacccctgttattttacctgaataaaatcggtaacttgctcctctcaagacctctgtttcctgaaaccgcttacgaatatctctaattactaactccataaaaactcctttgaaagtaaaccttttatatcattgtactattactgtggtttaatcgcaagttttttaaaactagtgtaataaagacaaaaaatggataaatacattatccatttagtagttctataaacgttgaagagcatccaatatttgctcttttaaagttattaaatcaccattattgtcaataataagactagcgaaactttttttatctgttaaaggcatttggtgtgaaagtcgtaattctgcttcttctcgactgtagttgttacgggccattaatcgttgtaattgtttttctttatcaacaaataccaaccaaatctcatcaaaccattttatatacttttcttcaatcaataaaggaatatccatgaaaaatatctcttctgtttgttttaattggtcgcgctgacatgctaactcttgacgaatgatactattttgtagcctagctgatgtcttcatattgtctggattagcaaaaatcatttgagaaagctttggtctatccaactcaccatcagcatcaagtatctcgggacccaaccattctaataaagcttggtaaagtttcccacccttagcttgcaatttatgaaccacttgatccgcatctatgactttaaaacctgattctcgtattatttttgttaccgttgactttccagaagctatccctcctgtcagtcctattatttttgtcataagcattgacaccgagggcaataatgcgtccctctccctcctacttttatcttcttaattaaacaaccacaccttggacacggttgcccagttttaccatagacctgtaaatacttttgcatcgtaccgtcctctccaagagcattcttatatgttctaatcgtggagccacctttttcgatgcctaaagttaaaatgcgaataatttccttgtgtaataagcttgtttcagattcggtcaattgattagccaaacgctgtgggtgaatttttgctgcccacaagacttcatctacgtaaatatttccaagtcctgctactaatctctgatctaatagtaaaggttttattggctttttggagtttgctaagccttttgaaaaaggctcaaattgaaatgtgtcagcagttggctcaggacctaattttttttgagtaaaataatctttgagagatgatttacgaaccaactcaaatgtcccaaatttacggacatcttggtaaaccaatgtgctgccattagtcaatttgaaataaaggtgaaaatgtttgttatctggtactttatttgggaagagtagatattttccttccatgcgtaaatgtgataccataaccatttcaccaaaatcaaaaagaagatacttccctcgtctcaatacctgttgaattgtttttcctggtagacttatcataaagtcattcaaatcagttttcaccattttagggactttaatcgttatagaagctatttcttgattaactacaagtctttctagtccttttctaacggtttctacttctggtaattctggcataaatatatagtctaaaaatcaatagtcattgcttagagcaataatttccaaacgttcttgatgtcacctgaccattcgatttctattttcctttcttattatcattttgagacaaaagctttaaaaattactcataaacttgcactcattagcattctttattattgccaagtactttttgacaataatgttcattataagtattgtaaaatgaatcttcacctaaatatttaaaaatctgtaaagctttcctcatatcttcttttcctgaagaagtatcaccaagttttaaatgatagtatccagttacatataagaaaacagttttttcatagaaattaacttcatcctgtaacaatgatctaaccttatcaattaagtagtggctatgctcaaagtaagagtgatcaatgctgatgattagacaattaattgctaattgtgtaactaggattttattggttttattttgttctgaataagcaaacgaattaaccatttctttggtcaataaaaataaagtattgtaattaatgagacgtgagcaatttcctaagagaataatttcataatatccccactgctccaccgtaaaaagatagtctgttaagcgtgctaattcttcttgattaggctctattgattgatcaattgaaaaaataagagccttaatcataatcttttcatagtctttatggttatgatcctctaagagagccactaatttagttacatttttttcagcacaatattttcttactcgatttaaaaggataaaaaaatgagtgtgcgccttagaatgaatcgacacaaattcatcaatagtgatgttgagtttgtctaaaatattaagcaaacgactacaagtaatttctgactctcctctctcaaaccttgagatttgtgacttggataggtgctcatctgctaaagaagaaatactaactttttttcctttacgtaatcttcttagtgtttttcctaattctttttccatttttcccactttcacaacaatttaaaagaccctttaaatccattatataatacaagtacaaaatagaaaatcagaaaggagatagtcatgaaaaaaattaacaaagctttgttgttcacattaatcatggatatcctaattatcgttggtggataaaactccccacaaatggttgttatggaatcccattttatttagtttataacaggagaactaatgaagattaaaaaaattattagtggccttgccgcagctttaattatcagttcactatcaactattaactatgaggttaaagctgatgacaccaccagtgagtatcactatatcagtaagcaaaataatgaagagcagcttattagttacatcaaggaacaacatcgtttgctcaatcaatttgttgttgataatgtcaactcattcactcaactaaatgctaatccaactattgaacagttaaatagagctataacattatttaaacaaaaagatgagcaattatttaaccaggtgaaagctggtcatctctctcccagtaactataatgctatcgttaatcaacgtaatgtcattaaccaaactgttcaaaatctgattgaccaaaatcataataagcttcagacaagtcaaaataaagcagctcagctcgtggggcaacgtaatcaggttgttaacaaaattcaagctattttagcaactgtaaactacaactctgtgaattctatacaagaagctgaaaatttatttcattcactcagaaatcaaattgaacctcttgtagctgaagttaataattacaaagctgctatggcaatccttcaacaagaagtagatgccctatcaacagcggctattgaaactgagacttctaaacttgctactctcaaagttagcgaaaatacttctgttcctgcaaacaaagtagaagaaaaaactactcaatcagaagcgtcaggcaataaacaagaagtaactaagagtgaggaaaaacaggctacctctgatgcaaaggcatcacagcctgagtcagctaatattgccgattacgatagtttaaaagaagttttacgaaataatattagcaaccaagtaccacacatcagtgttcaaatggagtttaaaactcaagaacaagttgacgaataccaaaaaaatctcggaagcatcatccgggaaattggagatacacttggaacagcaactgaattcaatgccaaaagtaacattagcacttatactcttggtggacaaatccaacgcattattgtaaaaagcgacatcacaatcacctatactcttaaaggtgacatggtaggattacataaagaatataaacagtttgtagattcttttgtcaaagaaaatattactaacaaaaatatcacaagtgattatgaaaaagctaaagtaattcatgaccacttggttaataattacacttacgcgactgaagaactggcaaccactcgtgaaactgctagtggtatcagtatccatgctcctgaagcactctacaaagataaacgtggtgtttgtcaagcctttgcagtaatgtttaaagatatggctgctactgctggcttatcagtatggtatgtaactggtcaagctggaggtggaaatcacgcttggaacattgttactattaatggcgttaaatattatgttgatacaacatgggataataatataaaaagcaataaatatttccttgttggtaaaacaataatggatgctgatcatcttttggatagtcaatacaatgcattagctaaagatattccagctgatcgccatcaaggtgcataactcaaaaattgtattgagcctggaaaggatatgaaatgtctaaaaagactgattcaaattatctacattccaattgttctgacaagaaaatttggagcgatgaggcgcctctgcaacaggagactatccctaaagacagagattgtgttatcaaacctgtcattactatgacagttgaacatgtggaaatcccattagatgaccaatcttagctctctcctaaaataaaaaggaacactgccatttttgacagtgttcctttttatttaaccaaagtggttttctcattactgatatgattcaaatcatctacaactaattgatcaatcgatttcatggtgtatttccaagcttgcagttgaacatgaaaaacagtctgttggtacatggtatcatgcatatcgtcaatgactttgaaataccttatataatctggtttaatcattaggaacagcatgatcatgagtggtcaaagagctaccagcaccatccagagcgatataaatatctttcatcatatagaagctatttgtataagtaaatctaacagtattgggctccccgcaatacaaaatcacttgggacagctgatccaaagagaacgtctgggtcttttcttctcgataacctattccaaagctcccacttgaagtacttactgaatctgttgcaacagaaaaacaatccctactactagaataatagcacctctaactaataaatgactcattccaacattaacatcttttaacatcatgttcctttcattattttttatttaggaattcgtcatactatattttctcatatttatctaacaaaaaactcgtaattctatataaatcatataaagttacgaactttatttagttaacaataaaataataacattttattcattaaaaaaacgaataacaaaagagccaaaaagctcttttaaactgacaaaaatgtcttagtaatgtgattagtctctcaatcttattacttagagtaaatcaagcaaaaatgttagaaaataaaaaatatatgacaaactattccaaacaatatgctcgccaatcgaataatgaatggattttgtatagtggtgcaaactagcgaaaatcaaacccataccaaaatagacaacaaagtcgacgacagatagaccatgtaagtgagaccagctaaatagtatagaagataagatcacaaccaagggaccactcagggagttcccaaatgttctcatgacaaacaacctgaacgttatctcttcttaaattggggcaataagacagatagtcaataataagacaactcgaaagtagtgattgacctgattcatatcagctattaatccctcctggttttgccttattgggaaaaatgtttttactagtagtgcccagcaaaataaaacgctaaaagcacctattgcaaatagccattttttgaggttagatgatgactcttggtagttactgattggctcagtttttgttagcacataactcaacagaatcatcattataagattaatgccaatccatatactccaactccactctaaccctattgatagtaaactaatcacccaatgcccaagcaattgttattattgtgttgttgcaactttggcaaagatgaatatagcaggatggaaaacagattgtttctgaaacttcaaaggtatcttcttatcacaagctattatttggttatctccataattaatctaaatggagcaatatatcgtttttctactaactgttgacaaataaaaaactcccctttaaagtctggtaacttttcgatttttaccaaaaacttaaggagagtgaggcaagaactaatagaatcttatttaaagttttatgattgggagaacagaacaactatcataattactgaaaaattatgaaaggcatggcaaacaacagatggtcaaatccgctctgttgaaaacaaattttaaatataattcatttcactttctaagtttattaaacatagagtgttcaggagaaatgatacgacctaatgataaaatcattcctatcgtataataaacaacgacaaggtgtaaataaaagtaaattaatatatctgatatacttgtcaaacatcctttcattataataaaagcaactaagataggaataagaatagtacacttaataaataaccaaaattgcttaacaacttgataccatgtgagtacttctgtcgtttgtctttgtttgaagacaaaaaccaatagatcaaagagaaaactccaacagataagtagtatatttttcattaatgttaaatcgtagaaactacctatactaaatagaatcactgcagaaataataacaatgcctaaaaatcttaatatattatgcatatcctcacctcctctactttataggtagcaaatataatcttgagtcatgtgctctcctttatttaagaaggggccaacaagcatgtttggctccctttaattaatttgtgaatataatctcaaaattatgactagttggttttatcctcgtgaattgctttttctgtgcgaatcaagtctcacggtgaacttatctaactcttccccactaacttgcggatctcaaaataaactcattaatactctttttcattatagccaaaatcagctaaatcaagctttttatcacgccagtttttcttgacttttacccaagtctctaggtaaactttatcacctaacataagttcaatatcacggcgcgccatttttcctattttcttgagcatagcaccttgttttccaatgataatgcctttttgactatcacgttcaaccatgatagttgcacgaatatgcactttatcagtttcttcatcacgtttcatggattcgacaacaacagctactgagtgaggaacctcttgttgcgttaaatgaagtaccttctcacgaaccatttctgatactaaaaatcgttccggatgatcagtaatctgatcttctgggaaatattggaaaccttcttcaagattatcagtcaataacttgattagggttggcacattatttccttgaagggcagaaattggcactacttctttaaaatccatttgactacggaagtcatcaatctgttccaaaagttggtctggatgaaccttatcaattttgttgattactaaaataacaggaatcttggcagccttaagacgttcaataatcatatcatcgcctttgcctcgcttttcatcggcaggaaccatgaaaagaactgtttcaacttcacgtaaagtactataagcagattcaaccataaaatcaccaagggcggtctttggtttatgaattcctggggtatcaatgaaaacaatttgctcagtttctgttgtataaatccccataattttattacgtgttgtttgagctttatcactcatgatagcaattttttgtcccataacatggtttaggaaggttgattttccaacatttggacgacctaaaattgctacaaatcctgacttaaatgtcatttcttttctttctccattcaatttattcgtaatacttctcatcataaaagtaaagcaagtatcttgggtataaaaataatcaatcccaccaatacggcaaataaggaaacaactaaaaccgctcctgctgccatatctttagcatttttagccagcatcgagaaatggtaattacttgccaaatcaactacattttcaatagctgaattgataatttcaaaagtaattaccaaaaaaatactcaataaaagaaataaccactccaccatagatacttggaaagtaagaccagcaagtattactaaaatggcagaaaccaaatgcttacgcatatttctttcttctttaaaagctgtaaaaatccctgtaacagcaaattccatgcttgatgttaaggtgcgatttttccattttttgtgattattgtcgtttaagtccataagcagttaaaatttcttcctgtaagctgaacatctctttttcttcttcgggtgtataatgatcataaccgttaatatgcaaaaaaccatgtacagctaaaaaacccatttcacgttcataagagtgaccgtactcttctgcttgttctttagctttatcaatagaaataaaaagttcaccaatataagaatcaaaatcttctagcatctcagcaagttcaggattttcagccagatcttcttcatcaaaagaaatatcaacctcaggcttatattctaaactgataacatcagtcggacgatcggtatctcgatactctaaattcaattcatggctacgttcattagtgacaaacgttacagccatttctttattctctttacctgttttttgtgctgcaaactctaacaaatcaagagtttgctttttgatatcttctgaaacttgtccagtttcatcaatcatttcaacgtacatcttatatagtaagaacgacccaaaacgtttagaaaagataaagtgtaatgcataattctaaataatcgacacatctactttcctaagtttttcacttttatctaaaactagttctcaaaataaaagtgcgttctcttccttccttcaagctattctttcacatcattataccataagagtattaaaaaagggagagaaagctaataatcactattacacacttataatccatttcaataaaattctgacttatgaattagtatttacttcaaaatacaaactttagagcgcctaacttacgtaaaactaattcctaaataaacaaagctacaaatgctataacgattatgacaaatttacatttagaatgtctctttatataaatagatttttgttactttttctcagatgctttatattcgtacacacctaaacaattattaaatttacgaattgttggaagtaaagagcgaagtgtgcctaactcaaatttgctcatctcatctgtaaagttaatcagatttatttgctttaatttagggtctaaatccacaatctcatgaccatctgtgataccaaactgaaattctgtatccatatactttactgtatcatgttgctttcctttattaatcatttccttatgacacaaatcaaattgtgccataaattggctaaatgaatttgtcaggatatgaagaaaagtctctacgtcatcttcttttagaaacattaaaacaccttctgacacgattagaaaaggggcattttggggatttacctcccgtgtccaagtttcatctagggctgattttgctatattagtaactctttcatgctcttcaaaaaataattttcttatctccataacctctggcaaatcaaggttataccacctaatttgtccattatcgactctttcaaaccttgtatcaagtccacaaccaattgaaaggatttgactatttggattttctctaataaattttttgatttctctatccataacgcgaattctagctaatgttgcataaaaagaagcttctgaattatcgaatttatcaaaatcatattctatctgttcaacaattgctaaggatttttgatcattaagtatcggatgtttagccatcgcatctttagccctaatatataaggtgattaataacgtttcagcaacgccgtgtaatgttatcttcattcatctactctcctttatgctattttacttagaaatttggatttctaaaactggatttctttaagtatatcattccaataccgtaagtaaagcatatccccaccatcaaatattccataattttctttttctgtacttcttatgctttctaaaaaaacagtcactaaattattgcaagctactgtttttctttttaataattataaaatatacaaatgagaactccttattttcttaacatttgtttctacaagaatgcctaacaacatatcaataaaagttagaagttctttaaagtcacacctagtatttcccatccttttaacgccccatttggaatgtttgtgaaaaatattcatctaaaattaattggtgttgttcatttacgatcgtaatatttttgacgtcttctttagaaaaatagtccaattgcaatgtttcctcattatgaaaaccttctatattaactggttttggacagcttacttcataaataaaaccgacggtttgtgctttatcgccattgggataagagtcttgaaagttagtataaacatttaacagtctgattggttccactctcaatccagtttcttcgaaaaattctcttttcaatgtatctactgatgactcacctaactccatacatccaccaataattccccaagaattcttatcagctcttaattggagtaagacacgtcccttaccatctgtcaaaataccaccagaatatgttaaaaagatagtctcatgtccaacttttgacctaatgtaggaaatataatcttgtttcattctatcaccttgtttaaactaatatgtacgtattgtagcataaaatatctccttttcaaatcactcatatacacttcttgaatattagaaccgttacctcttttattaacttactattaattattgactaaaaagagatagccctgtagaatggagacacatcaatattttacatttttaggagagcatttatggaccatttcacaaaactctggcaagatttctctaaacttccaaatgttgttgctatagcactcggaggctcacgctctggtgacagttttgaccaatcttccgattatgatttgtatgtttattgtgcagcaactcctgatatcactagtcgtaaacgtatccttaacaagcactgtcattacattgaacttaacaatcattactgggagcttgaagataatggtactttaaacgacggaactgatattgatattctctatcgtaacatagataactttttatcagacttagaagatgtcgttgaacaccacaattctcgaattggatacactacttgtttttggcataacctcatcaattgccaaatactctatgatcctgaaaatcaattacaatcactcaaagagagattcgaagtttcttatcccagtcagttacaaaaacaaattatcattcaaaatcgtaacttattaactggcaagcttccctcttacgataaacaaattataaaagcccttaaacgccaagactttgttagtactcaccatagaactactgctttcttagattcctactttgatattatttttgcacttaataagttgacacatcctggcgaaaaaagaatgatttcctatgctaagaagaatgctacattgcttcctaaacatttcgaagaaaatatcattaaactatgtcatcacaactccaacgaacacactgttaaagaaacattaaacgatataataatgcatctcgacgtcatgcttaaagaaaattttcaacactttataggttaagttgaagtacaccatcataaaaacgcctaaagcattaggcgttttttacatattgacacactctctaacaacgtctcctagtggcaaacatcagtccttatcagattgtagcttgtgactactttctgaatctgaataagcatttattatttcagcaacgacagggtgtcttacaacatcctttgctgataaatgaataaagtcaatctttttgatatttcgtaatttctcaacagcatcaatcaaaccagatttaacattctttggtaagtcaatttggctaacatcgccatttacaatcattttagaattgaagccaagacgtgttaggaacattttcatttgcattatagtggtgttttgcgcttcatctaatatgacaaatgcatcatctaaagtacgaccacgcatgtaagccaatggagcaatttcgatgatttcacgctccattaagcgacttgtttgctctttacctaaaatttgatatagggcatcataaactggtctcaaataaggatcaactttctctttgagatctccaggcaagaaaccaaggctttcaccagcttcaaccgctggtctcgttaagattattcgtttaacttgaccacgctttagtgccgttactgctagagtgactgctaaaaaagtttttcccgttccagcaggcccaataccaaaaacaacatcatgatttttaacgctatcaacgtatattttttgccctaaagtcttaacacggataggcttaccatagctatccttaataatttcttcctcataaagggcaacgaatttatcaattgaaccattttgtgccatggataaggctgttacaacatctgaagtattcacagtcatcccgcggttaacaagcactaataatgcttcaatggttaaccgagcggtttctactgcttcttcagagtcacctaatacctgaacacgttcagttctagcatgaatgataacatctaaattttcttcgattaattttaaatggcgctcattgctgccaaagagtgacatcatatcatctggatgttgtaaagtaatttcgatagagtattcttgcaaattattcttccttttcgtacagtaagtgactacattataacaaaatttcattttctttggtgattttagtcgttgtaaaactaaaaaatcgagaaaaacaagttttctcgattttattttacattataaaagatgagcttctcgaagtaattcttctaaataagttcctctaatttttttcatgcctactttacgcattaaggcaggtattggtaaatccatatcttcaacagatttcttatcattgagatagtataaagattgcaacaagacacgaatatcaaatgctgaattaaagacttctggaacaccacgttcaatatttaagaaagtataaacagcttccatagcagttctaatagaatattccgttgtaaatactgtatctctggatggagattctgcaaaattaccaatgaaggctaggttaacagatccttgtgggataacatctggtcggtcacctttaactcgaggcatgaaataactagtaatgtaaggcatataaacaggaactgtacttacatattgtttatcagataaatcatgaatcttcatttcaggaacacctaagtgatataaccactcttctgtgatttctcgaccagtacattcttcaattggttttttaatataattaccttccacatttgaatagagtccataaatccaaacaattgtttcattttccttttgctctttgaaatgcggttggcgatggatagcaaaactcatcatccaattagaatctgtaactgtaacaatgcctccggtatttactttaccatcatggaggtcacgatgtgttaaacgctctatataaggttcaatagctggatcttttattgttgcagtagcagaaacaaaccatgactcttttggaatatctttgtagaagactttaggatgtccaaattcatcagattgagcagctaagttttcccaaagattccaagaacctcccaaatcggtattaggtttagctacagtatcatgactaccatagttcgtactttcagtgatagaaccattcgttacaaaaacaaaatcatttggagtaagatcaattgtttttgcttcaccaccaactgtgagatgaatagcttttgcaagcttctgaccgttcttaaagtctacggagatattagttaccttgctatcaaattgaacatctacattatgagactctaaataactgatgattggtttcaccatagaatcatattgattatatttattaaattttaatgaagtgaaatcaggcagaccaccaatatgatggataaagcgcatagcatatcgacgcatttcaatcgctgaatgccatttctcaaaggcaaacatagtaccccaataagtccaaaaattactttcaaaaaattcttttgaaaaaacttcttcaatcgtcttagcacctaaagactcttcagtctccatgactagcttaactaactctttggaatgtgttccgagtgtaaaatcaccatcagattctaagcgattcccctgtttatgaatgaggcgacagttagatgaattgggatcatccttgtcaagccaataaaattcatctagataagaagcatctggaacttcgagagaggggatggaacggtacatatcccacatacattcgaagtgattttccatttcacgaccaccacgcgttacaaaaccgatatcaggtcgtttgacaccgtcaagtgatcctccagaaagaggtagttcttcaaaaatatgaatacgttgaccatccatttgaccgtcacgtattaaaaagacagcggcagctaatcctgctaaaccagaaccaacaatataagcggattttttatccacaccttcaggttttcgaggtcttgcaaaggcttcaaaatttccatttgtatatctcataaacaacctccctagggctatattttagatgactatattctactcctttgtgaaaacgattgccattaaaaaacctgcttttcagacagtcttagacaatgtgtccaatttctataacctaaaaaagagattgaaaatacaatctctatattattgttaatgattgagataatcttcccaaatatcatcaaaatctgttaaattaaaggaaaaactggcctcatcttctaaatagcgactaactgtttcaaaatccgaactatgttttggaaaagtggtttcatcaaaagcgtaatctgctaggattgctactggttcatttgattttggatttctttgtgtcatcaaccaactgtaaaatgattttctcaatgccagttctcctctagaaatgcatgtcttctggcactactcaaggcgtaacgagcagggttagtccgatagaatgcttgatgatagtcttctgctgggtaaaaagtatcagcaggctcaatgctggttacaattggtctatcaaatctacccgaagcttgtagcttatcttttgatttttgagcaatctgacgttgctcttcattctcataaaagatgacaggacgataattatccccacgatcttcaaactgaccaaaagcgtctgttggatctgtttgtgcccaatataactcaactaaatctgcataagagattttttcaggattaaaaataatttcaacagcttctgtatgtccagtagttttactacaaacttctttataagttggattctcaacatgtcctccagtgtatccagataaaacagattcaataccatctaattcttcaaatggttgtaccatacaccaaaaacaacctccagcaaaaatcgcacgttccatatcgttctccattctttttaatagatacattataacaaaaaaagccaaaatttcctctcagcttttttctataattagccattaattctagctataactaaaacgacctcgtgagaaaactttaaaagttcaaaagtttataataattctgtacctagctgatcttgtttgatctttttagctttcatgagtcctccaagtgcttttttaaactgacctttggaaattccaaaagtagctttaatttcctctggagaagatttatcatttaaagtcatgaatcctccgttactttctaaatacgttaaaatcatttgtgcgtcattttctaacatttcaaaagaacgaggctttaatgataaatttaaggttctatcaacttctctgaagccaataactcgtgcatccagcacttgccctaaacgaggttcactgtaacgttcactagggtgaataaagccgagcatattattttctggtagataaacaaaagttcctgacaattttaagcgataaacgattgctggccaattttgattttgcatattgttatatgcaggggttgccattcgttgaaacacttcaggatctgcagggagagcccagagacgatcttttttatcaacatctaagcaaacgtagaggcgatcaccttttttaggccaaagttctttcaattcaggaagaacatccaaagaaacaaccacttgcttatctggaagaccagtatcaagaaatactcccaagtctttacgtacctcagtaactgtcccccaaccataatgatctcgagtcgcaaatgtttctttagttgtaagacgtgctttttgttgcatatctgtataggcgaatcctttaaccatttcaccaatgtgatgctctccttctgactttgataatgcaaaggtaaagccatctttttggataaagtaaaaatctttgttttcatcagttactaagcctgttatgactgtcgctaataatgtattcatttttctccttttaaaaaggtaaccgacaaaccaaatccatctggttttgattctatcagttacctccataatcattttattacttgccaatcataataaagatagcaaacgttactattaaacttccaacaattctttttctttattagcagtcatctcatcaatatgttttacagcatcatcagtagccttttgaatatctttttcaagagatttcaagtcatcttctgtaatttctttattcttttcttgcttcttagcttcatccatagcatcacggcgaatattacggatagcaatcttagcattttctccgacttttttcacttctttagctaaatcacgacgtgtttcttctgtcaaagctggaataacaagacgaataactgaaccatcatttgcaggattaatacctaaatctgattcgttaatagcacgctcaatatctttgattgatgatttatcaaatggtgaaattaaaagaacacgagcttcaggtacagtaatagaagctaattggttaaggggggttggcgctccataatactcaacttgaatacgatcaagcaagctagcattagcacgtcctgcacgaatccctgcaaattctcttgataaactttggtgtgattgctcaaaacgctcttgagcttttgtaacgatttccttagtcatattttttatacactcctattcagatgctttgtttgaaacagttgttccgatttgttctccaagaacaacacgcttaatattaccagtctcattcatattgaaaacaacaaggtcaatatcattatccattgaaatagttgatgcggttgcatccatgatttttaaccctcgttttattacttcaacgtgagttaattcatcaaatttgacagcattggcatctttctttggatcagcattataaacaccatctactccatttttagccattaaaattgcttctgcctcaatctcagcagcacgaagcgctgctgttgtatcagttgagaaataaggcgaaccaatacccgctccaaagacaacaatacgattcttctctagatgacgtaaagcacgaccacgtacgtaaggctcagcaacagtttgcattggaatagctgtttgaactctagtatctaccccatattgttgaaggctatcagccattacaagagcattcattactgtccctaacatccctgtataatcagcttgaacacgatccatccctgcttctgctgcaggttctccacgccaaagattacctccaccaatgacaagcgctatttgaacacctgaattgtgtacttcggcaatttcttttgcaatagattgaacggtaggaatgtcaataccgacacccttatctcccgccaatgcttcaccagataacttaattaatatacgttgatatttaggttccactactatgttctccttattttgtctttattattttaccataaaaggcaaaattttaatagagcaatgacactagtaagttgatttctttatcaactcctaaaataagaaaaacataataattcagagattggtcaaacagttagtagaacacgctctcttcaagaattcattatcttctactaaataaccattttttatcagaaagacccggttacagatagcttgacaaattttagggtcatgagaaatcattataaaacttaattcataacggcgttttattttttgtaataaacgtagcattttaatttgagttactgggtctaatccacttaaggattcatcaaaaataataattttaggctttaagagtaaagctctagcgatacaaactctctgtagctgaccaccactaagttgtctagctttatattttagataagttccatctaaacccaccgcttctaatatttgacataattcaaaagttgttttttttccataaaaagcttcattcaaaatttcctcaatactaaaatatggattgaccgaactaagcgcatcttgaaaaacaaggataatctgcgccttaccatctttaggtgtgtaaatttttccttgaaaatatatcgaaccacaagtaggactatctagtcctataatgagtcgggcaaggctacttttaccactgccacttttacccattataccaattatttctcctcttttaagatgaaaatgacagtcctttaaaacctcttgtcgtccaaatgtttttccgacatgattacaaaccaacattaagaatatctccttcatactccatttgcactgtcagtgctttcgtatagttatgttgaggattgcttaaaatagcttgggtttgtccctgttcaacaacttctccctcacttataactaataattgtccccccaggtctctagctaactgataatcatgcgttacagtaatcaaggtttttccattattttgcaattcctgcaaaatagctgatatagtagaacaattatgacaatcaaccgctgaggtcggctcatctaatatgattacctgaggatcaagagataatatagtggctaacataattctttgtagcattcctccactaagctcaaaagggtatttttttaacagggatatcgcatcatctaaatttaaacgtttcatccattctaacgctttagataaggctactctctttgaacatttctcatgactaaggattgtttccaaaatatgcgcttcaattttttgaaaaggattaaacatagacatgggattttgcactaaataggcaatatctcgtccccttaatttctgccactgctttacagttagtttacctaaatcaactcccttaaaaaatatgtttcctctaactgtcataccttgtggaatgtgaccaaccaataattttgccaagagggttttccctgaaccactctcaccaataatagttagcgattctcccatatctattttacaactaaaatctcttagtacagggacctctcctatctgtaatgacaattttcttatttctaactgttccattgtcgtttccaatcttttttatctatggcatcgcctaaagtattaaaggaaaatactgttaaaaaaatcgcaattccaggagataacatcatccaagtagctgtcctaaaatatcctctagcatcgtgcaacatcattccccattctgtgacattaggttgcacaccaatccctaagaaagaaaagccagaaatcattaaaataatatttcctatattcataaggaccataacgaggattggctgatacacaaaaggaaaaatatgttttcttaaaatatgccagactgaaagtcccataatttgcgcatttatcacataaggctctttttttgcactcttaactaaattggtcattaatttagcatagtaaacccattccacaaagacaattgcaaaaattaaattccctagaccatgacctaagattcccacggttgcaagagagagcaaaaagctcggaaaagctaaaataatattagctatccataaaaagaggttttctaactttccttgataccaaccaacaataagacccacaaacataccaatcgttaattccaataagctaataataatagctaaaaacagtgaatatctagcaccataaagcaagcgagataatacatctctacccaattggtcagtccctaacaaatgaacattattgggagccaataatttttgtgataaatctacgtattgtggatcaaagctagatagaataggggcaaaaatggcactaatcactaacaataccagtaagctactcgaaaaataaattctttttgatattatttctcccttgactttcgtaaccgaggatcaacccaattcataaaacactgtgtcataaaattattagctaaaaataaggttccaaaaattagcatacaagcttgtattactggaagatctgaagttcttagactggtcacaaataaacgtcctattccattccatgaaaaaatttcttcaacaataattgatcctgttaataagtaaacccaagtcaagctaagtgctgtcattatcgcaggtaaggcatttctaaggaggtgatgtgtgacaatataacgttcttttactcctcttaatcgggcattttccacatttaaacttctattttcttgactaatagcttttcgaataagggctatgtattgacctacggtagaaaaacttaaggtaatacttggcaaaattaaactttgtaaatcgttacctcctgaaacaggcagaagatttaattttgccgaaaatagcagcatcaacaagtaagcaacccaaaaatttggcatagacacactagaaaaactcaaaaatcgaatcaagtgatcactccgagcagattcatgtaagccagcccacacacctaacggggtagaaatggtaacaattagcaagaaggcactcgtgcctaaaaataaagtagccaaaaaccgttgtaaaaccaaatctaatactggcaacctgagcacataagaatatccaaaatctcctgttaatgctttttggaaccacagccagtactgcttccataatggcttatctaaacctaaatagtgctctgcttcttttagcgcttctggactaacacttatttttgataaacgaaggtaattttctgctgaattaactgttgatagtttgataagaataaatgttagaagtgatatgaaaaacaatgccaaaaaagctgacaatatttttttgatgatcgaactacttagatacattgtttttttctatatagcgtaatgggaatgaattttcttctggcgcaaaacgcatggttttaaaatcacctttcctataaacagaaatcaccgattgataagttaatgggatatatacagcctcatcatgcaataattcaagaaccttcttatagtctctatcaacattttcttccttaggatctactagagctgacttaataagtctatccatttcagttttagttgctagattttctaaagctatattttctggatgtccatgatctgccttggcagttaatgccgacatccaagcatgagggtcccatggtgctccccaagaataggttaacatcatatcaaaattaccctttttagcattagcccaataatcatcttcttccatagcaataagagaaacattaataccgattttacgccattctccttggaaataagttaccaggtctttatcagttgccttagtggcgatataaggaagacgtaaggttagagttttaccatctttttcacgaaccttatcttttcccatcttccaaccagcttgatccaatagctgatttgctttatcaacattatagctataaggatttaacttagcatctgagtgagatgttgattttgaaaaaatagtgtctgctggcttttctgttcctctaaaggtgttcttagcaatagaaaccttgtcaatagcatgattcattgcctgacgaacttttttatcttggaaaatactttccttagcatttagcaacaaaagtcttgttgacataggttgagaaatagctgtgacatatttcttgtccttcgtatattgggcaaaagtgtctaaaccaataatgccattcccatagatcaaatcaacgtcacctgattcgaatgctaaagcacgcgtctgagcatcgggtataacttttacggttacttcttttaattttggtttctttccccagtaattctcattacgtttgaaggtaatatattcattttgctttttacttttcacaacccattgacccgttccaattggtttttttacattcttcttagttgtatcatcacctttagggaaagcgctatcagataaaaagcgaattggtcgaatcatagagagatcatataaagtagcactataagcttgtttcagtttaatttcaaaagtactttgattcaaggcacgataattttccaattgattcgttaaattaaaccaattatgattacctctattagacttcgaaaaaatactatcaaaattacgtttgacattcgcagcattaaagttactgccatcagaatatttagcatttctcaatttaaaagtgtaggtttttccatcttgactaatgctccagcttttcgctaaagctggttcaattttcccattgtcaccatatcgtaccaacccctcataaaccatatcctggataacaaactgatcagggttatagcgatgcggattaacatcaccaaagtcttctccccaagcaagcgtgagtttatcactgtttagtttatgacttttgctatcctgtgaatggcatgcagtcagagtcaccatcaataaacaagtaatgctcaataatatgttacgtctcatttttaccaactttcttttaagtttagttaattatttttttaagcaaacttaattagatcattttagtaatgtcttgtcaagaatcttaaaataaaaaatctacaacgatacaaaatttacttattccctgcgaactcattttaatagattattgctaaagaataatcataatagtcacataccatatcaccaatttcatttttccttattctcatctgttacttaaaacacatcgcacattcattagtctttaagaaggttaatacagataaaaagctatttttcaaaagaaacacatataatatcctttgattattaaaatatatacttaactagttaagtatatagaataaataaaactaggaaggaattcctagttttttattgattaaagtgagttaggatcaactttgataccaacaccttgtgttgttgtaattgaaaggtttgtgatgtaagttccttttgcagtagctggtttagctttaacaataacatcattaaatgctttgaagttatcaactaatttagcatcatcaaatgaaactttaccaataagggcttggacgttacctgctttatcagcacggtaagtaattttaccacctttagactcttcaactgctttagcaacgtccatagttactgtaccagttttagggtttggcatcaagttacgaggtccaaggacacgtccaagacgtccaacaagtgccatcatatctggtgttgcgataacaacatcaaagtcaagccatccaccttggattttagcaactaagtcatcttcaccgacaaagtctgcacctgctgctttagcttcttcagctttagcaccacgagcaaaaacaagaacacgtgaagttttaccagtacctgctggtaaaaccatagcaccacggatttgttggtcagcttttttaacgtcaatgttaaggttataagaaacttcaacagttgcatcaaatttagcaaagttagtttcttttgcaagagctacagcttcttctacgctgtatgctttagtgctatcaattttctcaagagcagcacgtaagtttttactttttttagccattttaaaattctccttgtaatgtggtcaatcgatttgatttaaaatctcccacgtcactcatcaaactacgatgaagtcttgcgggttatgtgggtgtttctgattagtcagtaacagtgaatcccatagaacgagcagtaccttcgatcatacgcattgcagactcaaggtttgcagcgtttaaatctggcattttagtttcagcaatttcttgtacttgcgcacgagtaattgttgcaactttagttttgttaggttcacctgatcctttttcaacacctgcagcttttttcaaaagaacagcagctggtggtgttttagtgatgaaatcaaatgatttgtcttcatatactgagataacaactggaataatcataccagcttgatcagctgtacgagcgttaaactctttagtgaatcccatgatgttgattcctgcttgaccaagtgctggtccaactggtggagctggagttgctttaccagcaggaatttgaagttttacaagtttttcaacttttttagccatttttaaaaatcctcctgttgtggttttggcggtaattagaaatttttacctcccacaggcatgtttataacataccttaccattatactataatcataaataaaagcaatagttttaagccattaatttcattatattttaaatttagtaatttctcaaagtaagttccgtctgccctccaaaaccggaagttagtgtgaaaaggatttttatggtggaattaagtctgagacgtttgggttagaaatgagtttatccatcatgacaaaacacaaacacctaactctcttagaccgtaatgacatccaatctggtttggatagaggagaaacctttaaagccatcgggcttaatctactgaaacaccctactactatcgcaaaagaagtcaaacgaaataagcaactaagagaatcaaccaaagactgcctagactgtccgctactaagaaaagctccctatgtttgtaatgggtgtccaaagaggaggatcaactgtggttacaagaagaccttctatcttgctaagcaagctcaaagaaactatgaaaaacttttagttgaatctagagaaggaatccctttgaacaaagagaccttctggaaaatagatagagtgctttctaatggggtcaagaagggccaacgtatctatcatatcctcaaaaccaacgatctagaagtgagttcttcaaccgtttatcgacacatcaagaaaggctacctatccatcacaccaatcgacctacccagagctgtgaagttcaaaaaaaggcgaaagagcacactccctcctattccaaaagcgattaaagaagggcgacggtacgaggattttatagaacacatgaaccaatcagagctgaactcctggcttgaaatggacacggttattggacggattggtggaaaggtccttctcaccttcaatgtcgccttctgtaacttcatctttgccaaactgatggattctaagacagctatcgaaactgctaaacacatacaggtcattaagaggacactctatgataacaagagagacttcttcgaactctttcctgttatcctaacggataatggtggggaattcgctagagtggatgatattgagatagatgtttgtggacagtctcaactcttcttttgtgaccctaatcggtctgaccagaaagcaagaatcgagaagaatcataccctcgtgagagacatactgcctaaggggacttccttcgacaacttgactcaagaggacattaatctggcactatctcatatcaacagcgttaagagacaggctctaaatggtaaaacggcttatgagctattctcttttacttacggaaaagacatcgcaagtatactcggtattgaggaaattactgcggaagacgtctgccaatctcccaaactattaaaagacaaaatctaacctaatcaactaactgatacaacctaaacgtctcacactaacttcaaccatagcggaacttaatctgaaacgctttcagatgaggatgttttcttgtaccctttttttgcgatttttaactctgaaaacctatgaaatcaagtattataaaaaccaacggaacttagtctgagacggattttcgttggtttttattggtttttatcagactaaattccatttctactagaggtggaacttactttgagaatttagcatattttaaatttctttcccaattccttttacattattacaacaatacttgagattttgaatctcaagtattgttatttatttatcctcaattttcttagggataacaaaaagaattgataagatcgatagactacaaaaaactaggtttaaaattaatccacacaaagctgctttgtgaaaatctgcattaccagaaaaagcatgataaatcgcaattgaagttgctacaccaattgcaccacctagtgaacttgccattttgtaaattccagatgcagaacctactttttcattaggaatactagaaatagctgtatctgttgatggtgtcgcatagatccccaagcctgttccaaataaagcataaccaacaaagactaacacaagatacaaaggtccttgaatattgaccaaagtcattaaaaatatcccaacaaatgtactcatagctcccaaaagcattggcttacgggcaccaaaacgttgtaaaattttctcaccaactcggatagcaattagtacacaaaccaaatagcctaaagacatttcacctgcaacctttggtgttagctggcgaccttgttgcatgtaagtattaataacaatcagagttcctgcaactgcattcagtaagaaatttgatattgtcgcacctaagtaaaatcgattttcaaacagatgaaagtcaataaaactattagatttacgtgtttcaacataataaaacagaacaaatccaataagcatcactgtaaaaagactcaatggaataacgttcatcaatccatgttcctgagccatagatatcccaatatttaacgataacattgaaataataaaaataattaaaccaaggtaatcaaagtgagttttttgtccaacatttttactttctggggttcctaaaattaatagaaaactaactactgatgcgatgattgaaaagataaagacataacgccaacctagagtacttgccaccgctccaccaaaataagaacatagacctgagccaccccacgatccgattgaccagaaactaactgcacgttgtctatctttaccatcatagtacgttttaaccaaggccattgttgatggcataataaaagctgctgccaatccttgaaaaatacgtcccataataaatagcactgctccattagctaaaacaattagtagagaaccaataatatttaagcaaagaccaataaaagtaaatttaactcgaccaagtttatctgctaaaccaccagttacaacaataaataaacctgaaaacaatgccgtacttgagacaccaatatccattgcaccagatgaaatacctaatgatgactgaacatctggtcccatgtttaaaatagactgtgcaaataaccaaaatgatagtacagcgagtacaattcccaccaataatttgttatttcctttgaaattttcctttgtcgttaacatatgttatctattctccttctacaagcatagcaagcgctgctgttgccattgatttagcagataccatcaatgatgattctgcaatttggaattttggatgatgatgtgggtaatatggttgcccctcttcatgtgctccaacatagaagaagcaagctgggattgtttgagcataataggcaaaatcttcagacggcgtttgagggtcgcaatcaatgacatctaaaatttcttttatagcaacagattttaaactatttgcaactttctgtgtcacttcactgttattaactaaaacaggataatcattctgatagtctaactgataactaacaccataagtttgtgctattccatctagaatacgcttaaattcctcctcaacaacacctcgtgtctcttcagacatcacgcgcacatcaccttctaaggttacactatctttgatcacattagcagaacctttaccatcaaaagatccgatagtaactactgctgtgtcaaatggattaactcgacgactgacaatcgtttgcgctgccataacaaaactagaagctgcaacaattgtatcatttgcacgatgtggcatggaaccatgtccacccttaccttgcaaaataactttaaaagtggcacgccctgtttgaatgggacctgcgtgatattgtaccgttccctcttccatcgttgacataacatggataccaaggacagcatcaatgccatctaaacatcctgcttcaatcattgcttttgctccgcctggtggcacctcttcagccggttgatgtaagatacggatatgacctgaaaattctgattttaattcaatcaagctctcagccaaaatcaataaataagctgtatgggcatcatgtccacaagcatgcatgacgcccgctgtttttgaagcaaaagaaagccctgtctcttcctgaattggaagagcatcaaagtcggctctcaaagcaatgtgtttgatgggcttatctgtcgctttatcaccatagatatcaactacgacgccattcataccaccaaattgtgtctgaacatgacagtccttacctttataaaaatctgaaatataagctgctgtttttgtctctttaaatgataattcgggattttcatgtaaatagcgacgaatagcaaccatttgatcacatttttggtcaagtttttcaaataattgatgtcgcaaagatgcattggccatttgctttcctccttaaaatatgaacagttaaaataaggctattattctaacaatctgctcttatatagtctacttttgaaaataattttttacaaataaatttttttagatatttctataactaaatagttatgaatatatcatgttatactactaaattaaatagattgattttagctcaaaatgatagtaaacttatagccataacgtatcataacttattattaatctaaggatatcaaactggttataaagtcttgaaaaatcaacaaaaattaatgtatctagagagtatcgagctatactcaaacatcactaaagccgctgcacacctttttatttctcaaccttacctaagcaaagtgatcaagcaattagaaaatgagttagaaataaaactcatccagagccaaggacaccaaacctttttaacttatgctggacagagatatctattctacctaaaagaaattgatatgattgagcgtcaaatggccaaagaactatatctcatccgttctgataaaaaaggagaaatcacacttgggattaactctggcttagcaagttctattctggcaaatgtacttcccaaatttaacttggagcacccagaaatttctgtcaaattactcgaaaacaatcaaaatatttctgaacaattggtagcgagtggtgatattgacctagctgttgggatggctcctatcctttataaagatggaattgcatcaaccactatttaccgcgacgaattgtttttaatgatacctaccaccagccaactctacaacgctgaaaaacgtggacagattattccttttgaatatcctatttcagttctagacaatgaacctcttatcctaacaccattagagtacggaattggcaaaacaattgcacaattctatgagcttcatcacatgtcattaaatcagatgattacaactagtaccgttcctacagcagctagcctatctttgtcagggatgggagcaacatttgttccacaaactctcattcatcgctatttggataaagagtgcaatgtctaccattttcataagaataagttattttcagagtacattatgatttataaaaaagatgttgaattatctggaattgctctcctactttataaagcttttttaaccaagtagtttcgctaattctattgaaaatcagtttacttcttaccaaaatcggtataaaatagacctatgatatacaaaattattgcttctttatttcttgttttaatccctatattttcacaggttcttgtcaaaatatttaaacttaaaaaatttaacattatgtttccagatgttgcttttcctatttttgtttttttaattccattaatatcatctagtctgttaaaacaaaatcttttaccttactatctgattctcatttcattactggcaatcggaattacaataaagcttctacgaacaaagactcttttttcttataaacgttttttaaaattattttggagatctggctttattctaactttccttttttacctaggattattggttatcatctttatcaaagtacaataaaaagagttggataaattgaactgcaccccaaaagttagacaaaaaatctaacgattggggtgcttttctgatgaaattaagttatgaagataaactagaaatatacgagttaagaaagatcgggatgtcctggtctcagattagtcaacgatatgatgttcgtatctcgaatcttaaatacatgataaaactcatggatcggtatggtgtagaaatcgtcgaaaaaggtagaaatgagtattatccacctgaattaaagcaggaaatgatagataaagtcttgattcatggttgttctcaactctctgtttctcttgattatgctctctctaattgttctatactcacaaattggctttcccaatttaagaaaaatggttatactattgttgagaaaacaagagggagaccgagtaaaatgggacgtaagcgtaagaaaacttgggaagaaatgacagagctcgagcgacttcaggaagaaaatgagcgcttgagaacggagaatgcctttctaaaaaagttgagggatttgcgcttgagggacgaagccttacagagcgaacggcagaaacaattagagaaatggtcacaggaggattccgactagacctcttacttgagataactaagatagctcgtgcaacttactattatcaactaaagaaactgaataaaccaaataaagacaaagcaatcaaatctgacattcaatccatttatgatgaacatagaggaaactatggctatcgtcggatttatttagaactgcgaaatcgtggctttgtcatcaaccacaaaagggtgcaaggcttgatgaaaagtatgggcttgactgctcgtattcgtcgtaagcgcaagtatgcctcttacaaaggtgaggttggtaagaaggctgataacctgattcaacgccagtttgaggggtcgaagccctatgagaagtgctataccgatgtgacggagtttgctttacctgaagggaaactttatctatcgcctgttcttgatggctataacagtgagataattgattttaccctgtctcggtctcctgacttgaaacaggttcaaaccatgcttgagagggcttttcctgcggcttcatacagcgaaaccattctccacagcgaccaaggctggcagtaccagcacaagtcctaccatcaatttctggaggacaaaggcattcgtccttctatgtcacggaaggggaacagtcctgacaacggtatgatggaatctttctttgggattctaaaatctgagatgttctatggcttggagaagtcttacaaatcacttgatgaccttgagcaagctatcacagattacattttttactacaacaacaagcgaatcaaagcaaaactaaaaggacttagtcctgtgcaatacagaactaaatccttcacttaaaataaattgtccaacttttgggggtcagtacaaaatttccaactctttttactttaggtttagaggataaagccctctaacagcattacaggcgtatatagcatcggctgattctaaatcttttaaagttagtggtgcttcaattactttttggtttttaaggagatgacgacgataaatcccattcaaccctccttctgataaatctggggttaaaaaccttccatttttttctaaaacaatattcccaatacttgtttccaatagcaacccctcaggagatacaaatatcttttcattctgaccttcaataatatgtgggcgataagaagttttaaaataagtaaacggggataatttaatagggtagtcttgtacgaccacctctgccgttaaaaacttttttgataaattcactagttgttttacctcaaacgttaccttaccagttttatcaagcattattttcaagcggtaatccttctcatctagctgatgaaggtattttttcagttccctttcgaatttacttttatcaaaagaataagcaaaataagacgctgattcaactaatctctcgacatgttgttgagagaaaagaagtttattttcagtcactcttcctgtagttattaattgaaattttggattgacacgtgttaaaacagctgatttttgacgggtttcttcatattcagaatctgtctggctctcccacgtaatacctccaccaacgccgtaataggcttgttgacctttcatttgtactgtgcgaataggaacgttaaaaatagcttgtccgtctggcatgcaaagtcctatcgtcccacaataaatacctcttggccgtttttccaactcattaataatagccattgttgatatcttaggagctccagtgatagatccacaaggatatagagcttgaaaaatagacataagtgtcacttctggcgataaaactccttcaatagttgatgtcatttgccacacagttgcatactgctccacttgacatagtttttttaccttaactgttccaacatcacagatacggcccatatcgtttcttaataaatcaacaatcatcatattttcagaacgatttttaggatcatttgccaaccaatctcgctccgccacatcttcttgataagtaggctttctagcgcttgttcccttcattggtctagttgttaagacttcatccttcttcttaaagaacaattccgggcttacagataaaatccttttatcgtcgtaggcaatataagcattatatcctgctccttgttctaccattaggcgttcataaacactaaagggatccgagcataattgttggctaagctctagtgtataatttacttgataagtatttccttgtctaatttgtcctttaatattagcaattgcctcttgatattcttgctcagaaacattagcagtccaattatctgctaatctaacattttcataacttaaaggaaaagcttcgttctcacaatctttatgtactgtaaaataagctagatgttctccagccaacttctgttgagaaactttaaaatgtgaatcaaaagcagcagatgcttcataagataaataaccaacaacataataattttgagattgataataatcaacttcttttatcacttctaagacttgttctaaagtatcagctattaattcttttgtaggatttttaaaacgatatctttttcctaattctttgaaatcaataacagtctcaatatgcattcgtaaccttcttcttcatctatttgcttcattataacataaaaaactaatccgacaatttcttgtcagattagttttttcttattcactcggagttggagtcattaaaacttttcgtggcttggttccttctgctggaccaataacccccgctgcttctaattcttccattagtcttgttgctctattgaaaccaacagacaatcggcgttgaatcattgaggcacttgctttttgcgtctctaaaacgagtcccttggcttcttcaaaaagaggatcactttcaggtactccgccgccaccaccagagccgttatctgtttcagatacttctccaggatcaaaggcatcatcatagtcagcctcggcttggtctttgataaaaccaacgatcctttcaacatcatcatctgaaataaaggaaccttgtagtcgtactggatgattctcatcaataggcttaaagagcatgtcaccccgtcccaagagcttttcagcaccattttcatcaaggatcgtacggctatcagtaccacttgaaacagcaaatgcaatacgcgacggaacatttgctttaatcaaaccagaaataacatctacggatggacgttgagttgcaagaatcatatggatacctgcagcacgtgctttttgccccaaacgaataatagcatcttcaacttctttactagcaaccatcatcaagtcagccaattcatctacaatgacaacgattaaaggcaaaggtatttgtttttgctcagaggaagcattaaactcttcaacctttgtattataacctgctatattacgcacaccaattttgctaaataactcgtatcgattttccatttcatcaacaactttttggagtgccttacttgctttacgcggattggttacaacagggattaataaatgtggaatatcattataaacagataattcaaccattttgggatcaatcatcataaacttaacttgatctggacgtgccttcatcaaaatacttgaaataattccattaactgccacagatttacctgaaccagttgaaccagctaccaaaagatgcggcattctagctaagttaaaactgcgagcattgccgttaacagcttttcctagtggtacttctaaaaggttttcaggattggcatcagattgttcccaaagttcgcggaaagaaaccgttgcaatttctgagttaggaacttcaatacctattaatgattttccaggaattggtgtttctatacgcacatcttttgctgcaagagcaagagctaggtcgtcagatagatttgaaatacgattcacacgaactccaactgctggtttaatttcatatttagtaactgatggtccaatttcagcacgttctacttttacatcgataccaaaacttctaaatgtttcttctaaaactctgatattctttcggactaaatccttttctttggattgatttttaggcttatctggtgcaaataaatctatcgttggtaatttataaaccagtgtcgttttaggtgtaaagtcgacattttctatatcactatcatctacatcatcatctaaatcataaaccatttcctcatcattttctctcatattaggaatcggcgaatcatagtcttctaaataaattgtcggctctactggtaaaggatcattttgaggcgatgtctcataagcaaggatctctggctcaaataccggagttgatgtttcacttacctcaggtggtagcgcatcatccaaattgtcctcagcttgatcctctagaatctcacccgtttcagggtctacattaaccgaagctaaataagcttcttcttcagctttttgacgctctatgcgctcttgttcagcgattgcttttttcatctctcgcttagcaaaacgctcctttttattttgctcgtgcttctctgccactttatttttaaaagctctaataaattcgacgatgtcataaacttccagagaactcattaaaaagagacccaaaatgatgaagagaacaccaatcatataggcaccaatattagaaaagagaaaagcaattggcttgtaaatcaaagcacccaacatacctccaccggcaaaaacagtgattttaaattgcattaaatcagacacaattaatcgagcagttgaacgcaaaatttctttatctttcaaaataggcattgagaaaaggtaagcatgccactcaatcaataatcctaaagaagctatcaaaaaacctgctactaagctatctttctttcgcaaccatttaaagaaataaaggtagattaaagttgccgcaataaataagtaagccaagctacctaccataaaacggatgacgttatagactgtaataccaaaaatacctaatctgataataccaaagaagagaataattgttaaaacaagagcagtaatcatcctttgaatagctctttgacgctctatttctgccttagtaggtcttctggttttctttccttttgtttttttcttatttgccataaataccatatttcaagtgaaatacttgttcctcactttctctatcaactcatgctatactattctatcataatttcaacaagtcccccaataggtttactatttacttttataaattatttaaaaatttatgataaaatataatcatcttaataacttaatcaaggagtatgtatgaaaaaaattatttatcttggtttagcctgtgtcagtatattaactttaagtggttgcgagtcaattgagcgttctctaaaaggagaccgttatgttgaccaaaaactagctgaaaactcttcaaaggaagctactgaacaactaaacaaaaaaactaagcaagccttaaaagctgataaaaaagcttttcctcaattggacaaggctgttgccaaaaacgaggcacaagtgcttataaaaacctctaaaggtgatataaatatcaagttatttccaaaatatgctcctttagctgttgaaaattttctaacacatgcaaaagaaggatactataatgggttaagtttccacagagttatcaaagattttatgatacaatctggtgaccctaatggagacgggaccggtggaaaatctatatggaatagcaaagataaaaagaaagattctggaaatggttttgttaatgaaatatccccttacctctacaatatcaggggaagtttagcaatggcaaatgctggagctgatactaatggcagccaattctttatcaatcaaagccagcaagatcattccaaacaactgtcagataaaaaagttcctaaggtgattattaaagcctattcagagggaggaaatccaagtttagatggtggttataccgtctttggacaagtaatctctggcatggaaactgtggataaaattgcttcggtagaagttacaaaatcagatcaaccaaaagaaaaaattactattacaagtatcaaagttattaaagactacaaatttaaataattctatcaaaaatgagactagaacattttctagtctcattttttaacaacactattgtttctttttaaacaaactttgtttaggagaaaataggaaagcaagtaaaaacataaaagtagatgttaaaacaatacttgatcctgcggcaatattaaatgtataaccgatatataaccccagaacagatgctactgctcctaatgcagatgataaaaacaacattgttctgagacttttaacataaagatatgctgttgcagctggtgtaattaaaagtgctacgatcaatattgttcccacactctgcatagctgttactgcaactaatgttaacaaaatcatcaataaataatgataaaaagaaactctcattcccattgattttgctaaaacaggatcaaaagaagtcaataataattctttaaagaagatagtaatcagagtcagtacaattaatcccacaataatagtcatatatttatcactatcttgtactgccaaaatattcccaaaaagaatatgaaagaggtcagttgtactattagcaagtccaattaaaatgatacctaaggctaaaaaggacgaaaaagtaattccaatagcagtatctccttttatgacactattttctttaatataagtaatgataatcgaagacaacaaaccaaagacaatagcacctataaaaaagttaatccctaaaataaaagatatagcaacacctggtagaacagcgtgagaaatagcatcacccatcaaagacattgagcgcaagataataaaacagcctactgcacccgctacaataccaatcacaattgcagttataaaagcattttgcaaaaaatgataagtcaataagccttcaaaaaatttcgtaaacattctagtctccttgtcctaacaaaatagcatcaccgtaagcagcacttaaattctcacgggtaaatgcctgatctattggtccacaagcaattagatgacggttcaaaataattacttgatcaaaataatgatcaactttactcaaatcgtgatggacgactaaaattaattttccggccttacttaatttttttagtaaattaactatgatttgttcactaatggaatcaatccctacaaacggctcatctaaaaaaatgtaatccgcttcttgaacgagacatcttgccataagcatacgttgaaattgtccacctgataaggcattaattggtctattttcaaaccctctcaaaccaacttgatcaatcactcgggatactttttcccagtcagtttttgatagtcgcttgaagaggcctcgttccttatataatcctaaagaaacgcattctccaacagttatagggaattggtaatcaatattagttttttgttcaacatatgctactctccccattaaaggtagcaaatctcccccaatccctgattctccagtagaatcaaccaaaccaagaagagctttcataagcgtagatttccccgccccattaggccctaaaataccaatgattccggagccttctaagcgtaaattaatatcttctagcactaaattattatcataacttacgcttaagtgtttactaataatcatttttcctccaaaagtagaatggagctggttataaaaccagactccacttctctgtatttattaaagctaagtcagtttttagattaggatttcgacattgttacaactcagccttaagcgagaatactacatcattgatttcattatgatttcaatgtcgattctcactcttattttgctaaaccttctgcaatcttatcaagattccatttcatcatagcgtagtagctgtcacccttttgaccttttttagcaattgagtctgtgaagatttctgcgtaaattgggatacctgattctcttgaaacagatttcataggacgcttgtcaacacttgattcaacgaataaagctgaaggtcttacttgttttaatttcttaactaagctagtaatttgatctggtgtaccttcttcttcagtgttaatttcccagatgtatgctgatggaactccataagcttttgagaaatatttaaagcaaccttcactagtaacaattaattttttattagctggaatggcattaaatttagattttgcttctttatccaatttttctaatttagctacataagcatctctgtttttctcataagtagctttgttttttggatctttagcaattaattgcttagcaatattttttgagtaaataataccattttcaaggttcaaccaagcatgtgggtcttctttaccttttccgctttgaccatttagataaataacatcaactccatcgctaaccgcaaagtaatctttgttttctttcttcttagcgttctttattaattttgtaaaccaagcattaccgcctgtttcaagattaattccgttgtaaaaaacaaggtctgcttgagttgttttttcaacgtctgctggtaatggctcatattcatgaggatctttaccaacaggtacaatactatgtaagtcgattttgttaccggctatattttttgttatatctgccaaaatagagttggttacaactacttttaatttttcgtttttggcttgatcctgcttgttagcacaggcacctaagcctaaaaatgctacaaaacatgatacaataactaaccactttttcatcaaaatgctccttttaaaattaatataagttatgtattaaattaagttaacttaattttgatattagcataacctattataaagtatttgtcaaatactttttcagtattttttgatataatggtcttagaaaaatagattttaagaagtataagaaagactgaatatgactccaaataaagcagattacctaaaatgcattcatgaattaggtgaaaaaaacaacaaaatttccaataagaaaatcgctgaaatgatgcaagtctcggctcctgccgtgtcagaaatgattaaaaaaatgataagtgaacaactgattgttaaagataaagatttaggatattatcttaccaaacaaggtttattagttgtttctgacctttaccgtaaacatcgtctagtagaggtatttttagttaaccatttgcactatactgctgatgatattcatgaagaagcggaagttttagaacatactgtatcaacaacttttgttgatcaattagaaaagttgttagactttccacaattttgtccacacggtgggactattcctaaaaagggagagtttttagtagaaattaaccaaatgacattggaccaaattagtcagcttggcacatatgttatcagtcgtgttcatgatgattttcagctactgaaatacctagaacaacaccgtttgcatatcaacgataccattgaattgacacaaattgacccttatgcaaaaacttatcacatcacctataacgatgaaaatctaacaatccctgagcgtatcgcaagtcaaatatatgtatctgctacataaataaaaaagtccgtgtattcattagatacacgggcttttttataatgctttcaaaaatgccattaatacttgggcagagcgtttaccagcttcaatgataaattcatcaaatgtgatattggcatcatgagctgcagtatcactcatagcacgtaccaccacaaagggctttcctgtagcttgagcagcttgggcaattgctgcaccttccatctcgacagctaaaacctgtggaaaatgccccttaataacatcaatcttttcctggccagcaataaaactatccccagttgcaattaaaccaactttactaatcatttcttctttagataaaactgcttcaaaagtggaaacaaaagtcttatccgaatgaaaataaagtggctgcattgacatttgtccatagtcataaccaaaggcggttaaatctacatcgtgataaactaatgtatctgcgacaacgacgtctcctacattcaatcctgttgctactgcaccagctgatcctgtattaataatagcatcaactttaaagctttctactaaaatagcaacactcatcgctgacatgactttcccaacaccagactgtactaaaacaagctcatgttcaccataacgtccactgtaatatacatttgataatactgtctcttgagatttatcctcaagattttccacaaggagttttaactcttcctccatggctgcaataattccaattttcatgatatttccttataatttaaaaattgcataaaacaagagagccaacaaaataagcaaaatgaataaaactaaattcaacttacgttgaaattcatttcgttttgcattctcaatccggcgactcttgtagatatgtttaccgttctcgtcagttagttgctccatgccatcttctgtagaaataattttagtttcttgatctaagattgtttgacctgaaactttttcacctcgatttgaacgttcaatcatatcatctgttaacaatggttttcccattaagaatgacctcccatttttaaaccgtaatattgtaaagcaatgatcgttttcgcatcttgaatcatgcctttttctaccatttgcatacaatcctcataacttaactctagaagctcaaggacctcatcatcatcttgtggcctaggattttcaactttttgtaaatcagtagctagatagaggacgattttctcattacaaaaaccaatagcagtgtagaaactataaagaatttcaagattccctgtgtagccagtctcttcttctaattcccgaagggcagcttcttccttagaacctgactcacccgtctcaagtttccctgctggaatttcgtaagaaataccttcaatagccttacgatactgtttcactaaaacaattttatgctcaggagttaccgccaaagtagcaacagctcctccatgaaaaacaagttcacgtttggattgtcccaatccatttggcaactctacatcatcaacagctactttgataatttgtccatcaaaaacagtttgacgattaattgttttttcttcaaaatccataagaacctcccaaataagtgttacttttgtgaaggatgatgtggttttttattggcatatccttctttattgacttgacgtcctcttccaatagctatgctatcaattggaacattatctgtgatggtagatccagctgctgttaaagcattatcaccaatttcaagtggtgcaatcagagtagaattacttccgataaagacattacttccgatttctgttttaaatttattttgtccatcataattgacagtaatcgtccctgcgccaaagttaacatcacaacctacctctgcattgccgatataagttaaatgacctgccttcgtattctcacctatttgagaaccctttacttcaacgaaattaccaatatgaacaccttttgcaagacttgttcctggtctaatatgcgcataagggcctacggttactccatcagaaataatggattcttcaaccatcgaattagtgatggtaacatcatttccgacttgagcatctactaaataactaccattggttaataaagtacctttaccaatcttcgtctgtccttttaaagtcacattaggctcaattacagattcttctccaatctcaacatcaatatcaatataagcggaatcaggattaaccactgtgaccccattaaccatatgttgacgtgcaattcggtgacgcatcactttttcagcagttgcaagtgctacacgatcattaactcctagactttcgtcaaagtcacgaagtttataggcacctacctttttacccgcttctttgaaaattccaataacatcagttagataatactctccttgagcgttatttgtattaatgtctttaagtgcttcaaatagactttgattatcaaaaacataagttccagtattaatctctttaacctgctgctcaaagtcattagcatccttttgttctacaattttagtaacttcatcatctgaattacggataatacgaccatatccaaatggatttgcagcatcggctgttaagattgttgcaacgtttttatgattgacatgaaaatcaattaagttttttaaactttctccagtaatcaggggtgtatcacctgcaataactagtgtatgtccttttgatgtcgctaattcttcttccgccatcattacagcatggccagttcctagctgttctgtttgcattacaaactctgatttgtcacctaaaacatcacgtacaagctccgccttatgtccaataacagtaacaattttacttggctcaatagcttgcacactacggaaaacatgctcaagcatggtaataccagatactttatgcataacttttggtaaatcagatttcatgcgagttcccttacccgcagctaaaataatggcataatttgacatattaattcctctatctctgaatataattcaacctattatatcataatgccttcaacttatcactaatacccctttaaatccctattacaatagactttagctaaaatagcttacttcaattaggaataaaatagctaccttttggtagctattcaatacatgaaatccgttaattttttcttctctgtttgcaatcagtatttttataaatctatcattgcaatgctcagatggtaaaaacgattagtttaactctgttgaaatttgccacatcacaccaaattggtctactaagtttgcgtaagcaggactccagaaagtttcttgtaactctaactgaacttcttgtgcactcttctttaatttttcataaatttcacgcgcctcctctacgctacccacaataatagcggctgtaacatttttaccagcttgatacacgaaatctggattttcatccgagatttgaagacgaatgccatcaaaaataagctgagcattaatgattaaatccttgcggtcttcaagacagttggggtccatctcttcccatgtcatcatattcactaaatccgcttgaaagacatctttataaaaatcaaccgcttgtcgcccatttccatttgttacgatgtatgtttctagtgctttaaccataagttctcctttttattttacttcacggattgcaaagtaattattgtcattatcggaaaaattaaaaactctcatactccccatatcaacaataggatttgtcataacctcatttgctgttaattcttgatatgtactgtcaatatcagtagtttcaaataaaatagagggagttgctaaatctagctcaggactcatttgagctataattgctttgtcatgtaagacgaagctaacttcactatccaacttcggtgcaactatataggttacataatctccttgtgtctgtttttcaacacgctcaaaacccaccttgtttttccaaaaatctgctgatgcttcaacattgctaacgtagagcattacctgtccaattgatgaaatcattttattatctcactttcggttttattactaattagtataacatacagtatttaaaataagtaaaaaatgactcaaaagagtcatttacttatttcgttaccatatctagaactttcatcaccgttctactatgttctaaagcttgagcagcacgcttaaaatctaaattgctaataataccttcaaaaataacaaattcatcgtgcatgcggtgcctatcaccatttaattgataaacatgactttcttgtccattcatagttaatgaaattttaggcatagtattagttggccctaaaatcgctatagaccccttatcaccttgaatagtagattttacttctgcactacaatcttttgctccaatacagactgttttaaagtgcccatagtctaggactagaactcctgaagtatcaataccacgctctatatttggtaaatactgtgctgttataggttctccaaaaagtccaattactaaatgtaaattataaatattaaggtctctcaacgcacctccacccatttcaggattgaaagctggtgctatttccccacgtttaaaggcatcataacgcgatgaatattgggaataattacattctacaattttaatatctccaaggttgcttaaatgttcttttacaaggtcaaaattaggtaaatattgatttgtaattgcttcgagtaatattagttgcctagtattggcaatagatacaagttcttctaattgacttgcttctaatgtaaatggcttctcacaaatgacatgttttcctgccaagagtgcctccttagcatagtcaaaatgcaagtgattcggcagtccaatatagactgtgtcaatctcctcattgtccaagacagccttatattcactcgtagctagagacatgttatattccttagctagatctttagctgtctccaaacttctaactgttgataagatagcaactagatcaataccttcaattttctgcaagacaggcaaaacttccttaacaatcatacctgtccccaaaaccgctaatttcattcgttaatctcctttgggtaaaccacttggaattcctctaaaactatcctagagtcctcactaaacattaaaccaaactcctcaaaataaggtttaaagaaatcaatgtgagcttttctccaccattctaaagttttatctccttctccttctttaaaagcatggtctgcagagacatctttaaaagggacaatatcaactttagttatttcaataatacagatagcttcatcattgctatccaaaataatatcatatgaaccaacttgtgtaacccttcctcatctaattcatataaatcataggcagaggccgttgcagtttttgtcccatctacaactaactttgccagaagatctggttctgctccaaattgccatgcgtctatctcatcaccgattgaaggattcaaagatttaaacttattccataattcttgtgccttcatattacctccgaagcaattcccacaacaaacttaactgcgttactcatttttctttgtcttttaaatccttctttaacatctaaaatataaacagtttgaccaatccaaacacgtaaataaacagattttattaaaatatcacctgatattcctttaacttcccgctcagtaccatcagatgcttcaaattccgtacgtaataaccaagtattaccacaaccaaattcaatctattttctcatttcaaactccagccaccatcaattttgacaatttcaccttgcattgatctcgcttttcctgaagcaagaaatccagttaattcagcaacttcacttggtttagtccaacgaccaattggcgtctcactagctacccattctgctaatccaccaggttcaaaatcactagcagtcatagcagtttgtacagcacctggcgctataccaaaaatttgaatacaatcttttgcgtaatccaaagccaattgacgtgtgaatcccgcaagggcatgtttagaactagtatatgcagctccaccgccacccgctataaaacttgctattgagcacatattgataataatacctgacttcttttccaccatacgtctaagataatgacgtgttagcctaacagtcacgaaaaaattaatatcaaataggtgttccagttcttcatcacttacttctagaagtggcttgtaggcatctagaatacctgcagtattacacaaaatatcaacagtcggtaccattgtgaatagtggggataaatcagaggataaatccaactttataaagttaaaattaccatttaagttcggtttatccgacttatccacaccatatacttgatacccttgtttcaaaaaatattgagcctgtgcataaccaattccactagcacagcccgtcactaaaacaactttagtcattgacctcgatccaatcctctgctaaaacatcacatggtgttggtgcccacatggaaaaaccttcaccttcaccagtaacattaataagaaaataaggtgtagcctgtagtactttcccattaacttcaagggtatcaaataactgaacataattttcagcgcccccccaacctgtacgtacatattttttctttgcttttaaacctggtaaaatttcttcaaatgtcatattgttctcctttattgtctttaaccattgatatatcaaggtttattgcttatttaaaatcataatttaaagtttcttcgccttttagttcatctaaaggctactattgttttcataggataaaatagtttctggtcatccattattagtaaataatatttcgtctttttcttgttggtcaagaacattatttttgttcttactccttcaattcccacaataaagttatctgcttgctccgtcaacaaaacaggtccattttccactaattcataagaaatacttagttgatttagcacagctataactttttcaaaatcattcgtaattttctccattcttccatagagttagcataactatttgtagactagagaacctaaaattgatacactgtttttcactcaaaaaattttaccttcataatcttcattatacctataacaattttcttttacaaatttgttccccttaaaggaaattgtttttcaaaataggatgtttatactattgtattatcggatgctttatctcgctagtgcaaaatcttctcataacacatttcttccttttcaaaataagtttttgatttacccttaaaagaaaaaccaaacctatcgtaaaatttccttgcgcgtgtattttctgtaaatacccaaagtatcactttattataacctgcttgttgtatctctgatagtacatgattcatcatttgagacccataaccttttccccaaccttctttaagactatgtatacaaatgagttctgcataatcaagcataccatcttctctacttttatcccaccaagccatacaatgaggattgctatctacttccaatatataccccttaccaacctccttgtgtagtagctgttgatacattgttatggcaggttctatttccgtagttttttgaatgatatcctcaggtagtatcttaccaaaagcagctttccagctctccgtttgaatataagctaaattgacttcatctcctaatcttgctctcctgattatgcaagccataactaaaatcctttcaaaaattattattaactgcctgataactactccaattataccattttcgtgatattaatttttattttgaacagttctggttctcatttatcattatatttctaaaattttagatggttttaaacattaacctcagattaggccaattattgataatcactaaaagagcgtagataattacgctcttttagtgattattttatatatatgaatcgctataacttctaagtaacacttgtttcaaaatccttcatttgtttctctctcgtaatatgcccccaaaccatttttttatttttatagccaataacacttgcaaccttaacaaaagttaatacaggatgtaggataagatacctaaaaacagcaatataaaatactttaacaatatctaaaattcctattactagttgctgagaataaatacggtgtaagaaagagcttaatgtaattaaaacacagtaaaagatataaaggctcaccaatgatataaagaatgggatgtttaattgattaaataataaggacaaaaatataatgacaataccaaaacattctataaaaggggtcagtaattcaaataaaatatagtaaatataagaaattgatcctacagctccaaagcgataattggcaaaaatacttttatatttttttaaacattggtacaagccaagataccatcggcgtctctgtttacgtaaatcccctaaattcgttggtgcttgactccaacaaacagcatctgtttcataacaaatacgataaggaatattattattacgacagaagaaatgtaatttcatcaccaactccatatcttctcctagagtctgggtgtcatatcctcccaccgctttaacaaggtctttcttaaaaagaccgaaagcccccgaaataattaaattagctcttaaatagtctaaaaagattcgagctcctaaaaatgatgaatcatactcaagtgcttgtgcacaaggaataattctccaaggcaaacgataagatgctactttcccctgctcaatcttaacaccttgggcaacttggacgagccctcccactgctataaccgtcggatctacctgtatggatttgctaatttgactcaaagaatctacctgcaacatagaatctgcatctagacatagaaaataatcgtaattagcagcattgatccccatatttaaggcatcccctttgccaccattttctttaacaatgagtgtcagtttaaccttaccaacctgtctctgaaagacatctttacaagtttgagtagcaataattgaatcaatcgtattcgagattttcattaatgcaaactcttccttgagaacatctgaagtattgtcactggaaccgtcatccacaacgataatttcatacgcttcataatcaaggtgcaataacgaatcaatcgaactcacaatggttgttgattcattataggctggtacaatagacttcctgcgaaacaaaatatggtacaatagttctatgaattatgaagcaagcaaacaattaactgatgtacgatttaagcgccttgttggtgttcagcgcactacttttgaagagatgttagctgtgttaaaaacagcttatcaacgtaaacacgcaaaaggtggccgaacccctaagttaagcttagaagatctcctcatggctactcttcaatacatgcgagaataccgcacttatgaacaaattgcggctgattttggcattcacgaaagcaacttaatccgtcgaagtcaatgggttgaatcaactcttattcaaagtggttttacgatttcaaaaactcatcttagtgctgaggatacggtgattgtggatgcaacagaggtaaaaatcaatcgtcctaaaaaaatcaactagcgaattattctggtaaaaagaaatgtcatgctatgaaggctcaggcgattgtcacaagccaagggagaattgtttctttggatattgcagtgaactattgccacgatatgaagttgttcaaaatgagtcgcagaaacatcggacaagctgctaaaatcttggcagacagtggttatcaagggatcatgaagatgtattcacaagcgcaaactccgaggaaatcaagcaaacttaagccactaactcttgaagataaaacctataaccatacgctatccaaagagagaatcaaggttgagaatatttttgccaaagtaaaaacgtttaaaatattttcaacaacctatcgaaatcgacgcaaacggtttggattacgaatgaatttgattgctggaatgatcaaccgtgaactaggattttagtttcgcaggaagtctaataattgaaattggaattttttctttatttctagttaaactttttttgcgctcatttttttcatagagatgaacacctccaatgactaatgaaatcactaaaaagctggcataggcaatcaataatactaagaaaatgacttgagatacctttaggaaggtaaaaaataatgccatagaaaatcccctttatttgatatttatatcctttttccgaatacgaagccaactaagcttatctaatcgttgtcttaagatatagtgaatgttaaaaacaataattgctaagcaaatcaaaatgtaaaaatataaaatattatgtaccatatgttctctctctttctttagaccattctttcttaatactataataggagtcttttaaaaaggttttggtatcgggtctctcccaatttttcaaacgataatctgccatctttatcagtgtgttttctttgctattagcacctaatcctaaagcaatgctctcaatttctaactccttcacaccataatgtttaaagtaatcatcgtgaattttttgagatgatggatcagaaaaattcaacaactgccacggaattctgacctctataaagtcctttccaaacgaaatatctgtttgtgaatcaaatgttttttggtgcctatcagttgttcctgttttgagaagaccagtaggatgagttggtaagaacctctctgttgcttttactttttccatgtcttcaacaatctttgtatttctcaataccatatttatctgctcaaaattactactgttcttctttggtgggaaagcataaaaatctttaccgttaagctgtcgaagatagttcgcttttaaggcattatagcgctcttggacaaataattcagacttgccatttggatcaatagacaatacaaagtcactagatttagaaaatgtgaccttactaccattcatttttctactaccagattttggtgtaatatctattggtaataatcgtttttcttttagtttttcaggttttgttttaatcgcaaggtagagatagctttcatcactgctagcatataagtcatctcctgttgcactagtcatcagaggatgtttccactctcctttgcctcttttaccatcaacttgataatgatgttttgcgtttttaaagcctaataaaccataaccttgattaaatacttgtgcatccccccataggaattgactatgtttatttgtggcgaaagatgtattccacgcccttgcattccaatcgtcttgccatgcattgatagtcgctccaaaactaccggatgatataaaagattcataatcttctagtaaacgctgaccttgttctttttcattaatcggcagaggacgtttatcaatttctttttgggcaatacctctcgctgtcgaatagccataacccgtgactagaacagggattttgtgataagcatttagcagtttaacgtatccctgtgacaaagaaagttctttaatcttttgtctatcttctttactgatattctctttatcaaataatagataatccttgtatcgaggatggaaatcaatagctttatatgctgcaaacatacctgctttaacatttgaattagcttgaatattttctacatttagttgtacgtatttaggagcctgtgcctcaaatggttttcgataatgaaaagggtctgttgttggtgagtttgaaaaactaatcaaatgttgccaaccatatttagctgtctcataatgtgtcaattcatccattacttgagctagcatgacctcaaatggattagctgccacagaagttttaaaataacgtcctttatattgcgtttttttctcttgatgattagtataagcgacagtaccactattccaatcatcccctacgacataaccaagtacccaaggactaagatcataatgataatgacggctacccaaatcagtattccatacttgcttacgcccatggagaatatccacaacgccttttgcttctcgttttaaataccccctataattatcattaaaagctgttatagaagcattattgcgataagaatctatacgtattccttgcaacaaatacagtggcctctttgatgctttgttgtggtgatataaggcatcgtaaaatgcaacattcatcggtaccttgactcttacagtatttgcccccatgttggaaattaaatggaaccattcacgatacgttttttgagtaataggaaaatcgttgtgatgataacccgctaaggaagactcaacgtctactcctttaacaacaaaaggtttattggtgggcttgtgaagtacagtatcacctttaacaacaaagttagttcttgtattttcttttaataagccctttggtaaatacaaactaccatcaaagtaatacaaataataaatagagctaaacaaaatagttaaaagggctacaatacttagatattttttcataatgttctactccagtaaagtattagtatttttcgatggtgcactatattgatacaaggtctcaatatttctatccatccatctgccacgctttttgataaaatcttttaattgttctactgatttgtgataacttgtcacattgcgttcagtaggaatcaaataattccttggatcagtattctttaaatcaaagacatagccccattttttataatttcgatcaatagctggacctaaaaaatgccttgtctcgtctatgtaattagataaatattctgtcgctagaactccctttcgtaattctttatagcgatgaacaaccaggtctataaatgctttgtccttaatgagcatattgaaccacggtgcatccgtcaaggtaaaatctgcctcatcaacacgtccttcaatttgattatcaaaagcattattaaaatcccaaactactagttttgctctatcacgaagatctttatatagataggttgaaaatttacccgcatccacatttctaaaaaattcattgatgacaaaataatttgcaaatgattctctatcaatatatttaggatattgtgaaaaatcataagaataaaggactttttcaatatgattgatgtccttattaataaactctaattgttttgatgtcaatctttgtttacctggatatttcacatcaagagctgagataccagactggtgtgtataatgtacatagttatctaacttttgctttgccttatgttcacgatcccaagcaacgatataaggtgttttatgcaactttttatcacttttttcaatgggaactcgttgctcaccttgttcgatattctcaactgctagatatactccctgatactcaccattgacaaataactcacagtagcgaacgtttggggcataggacataatctcaccagcaatattataactcagataatttcttaataatgttctgtctagaaagggaccatgcaatacccactccgattctttaggcattcctgctaatcgatgcttcttttcctttaacttattagtaacaaacttaactttcaatgacttcttatcaaagtaacgagaggtatttcctctatatgatattaacccttttgtcctaattctcggcttttctgataaatgatgtgatctacttggagaatcccgtaattcgatatcaacattaatattatccctagctttgacatattttccgccttcttttgtaacaagaggaataacttgttgctttgtatcaatgctgataatgggcaaatgggttttaaatcctgttaaatcactcttcgcatctacctgctttatacgatgatgatgtattctctcgatgtgatgcttaggaatccaaaaatagaaaaataagaatagaaaaagacctataagggttgtgccgtaaataaccttccctctcataagtctacccattgatttcgtcgctttggctaacaatgttgaaataatcaatatttcccaattggtacactttttcagttaactgattatctacatggagttgcttatcgtaatcttttctagagatttcgaaaatcatttcaatagtattagttgttgaatttttaacacgctgaacagcttttccgtcaaaatattggaagaaaattccttctaaatcaacttctagtgttctatcgcacttcacaatcaataacatacgattctcgtttttaacacgtcccataacccataataagataaagataacgctacttcctaatgcagctaccacatagtcaccgacaccacaacagataccaacaactatggtccaaaaaatataaactgtatctcttgaatcttttatggctgtcctaaaacgaacaactgacaaggcaccgaccatacccaatgacaaggctacattattaccaataacggtcattactgttgcagtcaagaccgtcaatgtcattaatgaaacattaaactttttactataggcagttccactatgcgtataagcataggaaacataaataactacactcaataaagctgctacaagaatatgtaaaatcatatcttgaaaacttaaatttccactttgctctagactatttcgtaataggtctttcatttttttgttatcctctcacatttaataataattaacgtatatactttttcactaaaaacgataatgtttactaacagctcttcctaaacaatacttactcgctgaaagttcacttctatctaccgaatctaagagttctttaatataagacaataaaaatccattatatttaacttctaaaataacaagataaggatctaataaataattttgatttaaatcctctgagaaaatatcataactagcctctgtacctattatatggtggtcaaaggtgattcggatattgttttccttagcaacaaaagcttttctttggtactcaataaccgttttaggttgataaagttgcgttgttatccttgaataacactccgcagcaaatgtatccggataatttaataaaacactattgttaccattaatcagcgcttgagcatctgtcttgcttaattttagagagcgctttttttgattagcaccttgtttttgtttcatttctaatttcgcaaaattgctttgactaccataattgcgcaaacgaatctttcttcgtatctcaacaccatcttccttttcttgccaatcaacatcttctaaagaatcaaagtatagcgaacggatagtatagccgtcgtctgaactatgcgaatcgagcgtcattacttgggaaaatttcttagataaaagatagtaatcttcaagtgatattaaatattttttttcctgtctaagaacttcgttcatcactcacctatgtttaattaaatattaatttatatataaatattaacaataaattaaacaaaaataaatatatcagaaattatacaccttgtcaacaggaaaatatataatgtatattttttttatacgaaggcatttcaaactttatttttatactataaatatgattgttacgctcatttaaacctagaagaaaaatgtatattttcaatccacagctgttataaaataatttttaaaaagtgtttatatcttagtttaatcacaccttactacaatctatatatcatttaaaaaaatctgatataaaaaaggctaaaactaagttttaacctttttgacatatctataaaattgaaatagtgctatccttcaaatttctctaaatcaaatgcttggcctttttgtttatctgacagcaccaaagaaaatactataccaatcaacattggaactagccaccccattgaaatagtatgaaaggggaggaatccaactaactgagttaatgttttttcttgccattgtcccgctagaacctcaacaaacgacactaaagtgacaagaccaattgtcaaagacattcccttttttgaaagcggcaaccacttattaatcaaaataattaagacaataacaataacaatcggatacaataaagttagcacaggaactgaaaaagtaattacagcatttaaaccaagattagcaattaaaaagccaatcaaagtaaaaacagtagcaaataatttataattcccaaaacgaaagttcttatcaaaaaattcagatactgacacaataagcccaactgttgttgtaaagcatgtcaatgttaccataatactcaagaaataacgaccaaaatttccaaataatttataagatgcttgtgataatacataagctcctttattaacatttgggtcagctaaaatatcagctgggacaggaaacttattccctaaaaaacctaagccaatatataaaatactaaatgctaaactagtaacaattccaacaatccaaatggttgataaatattcttttttagttttaaaaccaaactttttaagcgtttctgttgctactagacaaaaagcaactgctgcaagtgcatcaagtgtattatagcctgctaagacaccacttccaaacgcttttcctgcatagtcagcactcgccttagcactctccaagtttccataagcaatagctccaacaacaaccaaagagagaattaaaaaggcaaaaacaggcgttaagatttttccaacactatctaatataccatttggtctaatagcgagataataagctgcagcaaaaaaacaggctgtaaaacacaaaagagcaatcggactatgccctacaattggagcaaccccaatttcaaaagaaaccgttgctgttctaggaatagcaaaaagtggaccaatagttaggtagagtataactaaaaatgttaaagaaaaccacggactaaatttttccgacatctctgtcttataaccaccattagttagtgtgcctagtaggagggtaataatagctaatccaactcctgacaaacaaaatcctaaaatcgctggccagaaatcttgtccagatgctacacctaatgctggtggaaaaatgaggttccctgcaccaaagaagataccaaataagagtaatcccgttaaaaagcctttttttaccataagcaaccattagtgtaaataatctatttacaccctttccataaattctccttatcaaattctatctaaatgcttagaatcgatgtcttttattatatcaaaaataaaaataaattctaggtcattttcataattttccaactattcagtcacttttttcttgaaaacaaaaaaagagcataatgctcttttcgattaaccaataattgatccatttgccactgctgaatcgaccgtcaacactgtcaatttaccatcatgttctgctgagagaatcatgccttgactgacatattttttcatcattttacgtggtttgaggttagcaacaatttggagttttttccctactaactcttgttcatttgggtaaaattttgcaatccctgataagatttgacgatggccctcatcaccagcatctagacggaaacgaagaagtttatcagaaccttccactttctcaacttcaattacttctgcaacgcggatttcaacagcgtcaaaatcctcaaacttgatttgacctttgcttgatgtcaattcaacttcttcaggaacccactccttttccactggtgcttttccagcattcatttgttctttgatataagtaatttcgtcttccatatccaaccttgggaaaattggtgaaccttttgcaacaactcgaacaccttctggtagatcagcaaaagtcaatttttcaagatcgaatgttgcccctaaaccaagttgttccataatggcatcggaagtttccatcatgaacggttgaatgaggtgagcaacaacacgtagactagcaactaaatgactcattacagctgctaacttatcacgatctgtttcgtcttttgcaagtacccacggtgctgtttcatcaatatatttgttagttcgtgaaataagattccatacagcttcaagggcacgtgggaaatccaccgcttccatttgtttatgatagttttcaatactatctgtcgcaacagaagctaaatcggcatcaaagtcagttgcaacagcaaaccttggtacttctccatcgaaatacttgttaaccatagcaatagtgcggttgagaaggtttcctaaatcattagcaagttcatagttaatacgtccaacataatcttctggcgtaaaagttccgtctgaaccaacaggcaatgaacgcatgagataataacggagtggatcaagaccaaaacgctctactaacatttctggataaacgacattcccttttgatttagacattttaccatcttgcatcacaaaccaaccatgagcaactagacgttttggtaatggcaaatccagcgccatcaacatgataggccaataaatagagtggaaacgaagaatatctttaccaatcatatgaatgtctgctggccaaaatttatgatattgactgagatcgtcagaccaaccataaccaagagcagaaatatagttcatcaaagcatcaatccagacataaataacatgttttggatttgatggtacctgaactccccatgtgtaagttgtacgagacactgctaaatcttctaaacctggttctataaagtttttaagcatttcattcatacgaccatctggctgaataaattctggatgctcagcgtagtacgcttttaaacgatctgcatatttgctcatgcggaagaaataagattcttcagaaactttttcaacttcatgaccagatggcgcaacaccaccaatcatattaccgttttcgtcacgataaacttctgctaattggctttcagtaaaaaattcttcatctgaaacagaataccatccggtatactcaccaagatagatgtccccttgtgccaacaattgttcaaaaattttagcaaccgcttcttcatggtaagtatctgttgtacggatgaatttgtcataggaaatatctaaaagttcccataatgttttgacactttcagccatgccatcaacatattcctgtggtgtaatgcctgcttcttcagccttttgttgaattttctgaccatgctcatcaagaccagtcaaatactgaacatcaaagcccatcatgcgtttgtaacgtgccaaaacatcacatgctatcgttgtataggcagaaccgatgtgcaatttacctgatgggtaataaattggggtagtaatgtaaaatgattttttttctgtcatgatttctcctataagccaccctaatgagaggtgttttttatcatgatacattataacataaaatctttttcaactggatatatctctgaataatatatctacttttgctataataaaggtattaaaaatagagagttaatatatggttaatacaaaaacacttctcccctacaaaactatgccggtttggactgcacagtctattccaaaggcatttttagaaaagcataatactaaggaaggcacctgggcaaaactaaccattctaagtggttctttagtattttaccagttatctcctgatggagaggaaatctcgcggcatatttttgatgctagtagtgatattccttttgttgatccacaagtctggcataaagtttcgccgaatagtccagacttaagttgctatctaactttttactgccaaaaagaagattacttccataaaaaatatggtctcacgcgcacacattctgaggttatcgccagtgcacctctcttatctgagaagagtaatatattagaccttgggtgtggtcaagggcgaaactcactttatttatcgctgctgggacatcaagtgacttctgtcgattcaaacggacagagccttgtagctttagaaaatatggcattagaagaagagcttccttacaatataaaaaggtatgatattaatactgctgctattgaagggcactatgattttattttatcaactgtggtatttatgtttttaaatcccgactgcatttctgatattattttacaaatgcaatcacatactcagattggaggatacaatcttatcgtttctgctatggataccgctgaaaatccttgcccgcttccattcccttttaccttcaaagaaggacaattgaaatcttattacaatgactgggaaatcatcaaatataatgaaaatttaggtgaattgcacagggtggatgaaaacggtaatcgcttaaaattacagtttgcgactttattagctcgaaaattaagatcataaaagtgagtagaaatctactcacttttatctttggttaggtaataagtatattctaaacccatacataattatcctataaaatatatagagatgatatttcaaatcattattgtaacaatcagctttagtatagctcttcaacataaaacgccatacattaggagtgcctttctacttgtaggttataaaattcatggcctaacagcaagttgacatataaaagaggaattaatattaatgataagctccattcgcccagtttacttgaaaaataagtcgagcaaacaacaccaaagataaatcctccaataataataatcgtatttctagcaattaagaaaatatcagaatttttttcgtaaagtccctttgttaataaataagcagcattcttgatattaccagtcatcatcatattagcataaggtgctcctctgagcgatttaaaggtatctacttgtattgaagcaaagaaggctagtcctgccacagtaaacgacgatggtaagaaaggagtcaatataattgttactatagcaacctgtgtcaacgcaaaactagataataggtaccagtgcagttgatgtttattcgcccaacgattcatgaaataagtaaacgattgacctaacatgaaaaccattataggtagcaaaaaagcaagcgcttgactataatgcttattactaagatgaatagcaaaagataacaaattccctgtttgtacacctgcaaaacgttttccttgtgttacataagtaaaagcattgatataacctgaaataaaacagagtgcaaccgcacacctgagcccttcatatatttgatattgacggtgagactttttagacatattttcctctaactttatggcaaacaaaaataagactgggcaatcttgctcagcactttttttctaatagattggtttaaaatagtattaatattagcactagctagcctaacagttctaaataaattattaagcaatgataaatgtagttttagtatatcataacctcagcattgaagcaatctcactttatgaaaggataaagaaaatctcataagtcatttacccttaatttgaagtttaattagttacttttaattttactaccaaaaaacttgcaccattcttaacatttgttacaataaatacaacctattaggaggtcagtacagattatgcacagcactatttataaatgtcatcattgccgttatctaatttataaaagttttaaagatatctttccttttgctctcattttttcttggattgaaatccttcaaaaactcgttatatcagatgattcttttttagctcaaacaacaaagtccagtatttataaaaacgagtggttatatacggtttccaatactctttatgatttatctcatttactaatctactttatggctagttattttgtggctagtttagtatggagagacttatctaaccaaactaaagaaagtttttctgcaagtttacttggctttgccactgtttggttgcttctaacttcagttgttccaggtacagattatcactatcctagccaacccatttggcttatgctggctttgatttcgtatctttttatctttttaactcgactgcttcaaaatcgacatcatattttccagtatagtatgttagctatactactattaatctcttctattttgtcacatatcttatatcgttatcctaatattgatttagaataccttatacaaaatcacttttctcaatggctgggtgatgggccacatcaattaattcctattatgctttggtctatcttagctatttttctaaccttatcaggtctttttgtaccagatattttatttcgtccttactcctatttttcagtagttagcgaaaatttaaatgctgccttgagccaacatacagataaaatcccttatctgtataccttttatactgttaaaaatagctttgctatgtttggcggtattggaatcctattatccttatttttagcagttttatatgaaagtagaaaactacaatcgaagaattactataaattgacattactgaccttaactcctcttatttttgatcaaaatttaccatttttagtaggtctacctgtcattttacaaccaatattattcattccgatggtattaacaactatctttgcagaggcttttggagctcttatgctctacctaaaatttgtcgaccctgcagtttatactgtcccaagtggtacacctagtctactatttggctttcttgcttcaaatggggattggcgttaccttccagtcactgcaattattctagttgttggcttctttatttatcgtccgtttgtcaaaatcgctttcgctaaggaggagcaatatgaaaaaattacttagatggcttcctcctgtacttttcattattatccttataggaatgactatcttaggtaagtcctatatcaataaagtaacagctcacaaaataaaactctataactctcgaatgactcctactattttaattccaggatccagtgctactcaagaacgatttaacagcatgttagcacagctcaaccaaatgggagaaaaacatagcgttttaaagttaactgtcaaaaaagacaatagcattatctacaatggacaaattagcggcaatgaccacaaaccctacattgtcattggatttgaaaataatgaagatggttatagtaacatcaaaaaacaaacaaaatggctacagattgctatgaatgatcttcagaagaaatataaatttaaacgttttaacgctatcggtcattcaaatggtggcttatcatggactattttcctagaagattattacgactctgatgaatttgatatgaaatcattgttaacaatgggaacaccttttaactttgaagaaagtaacacctcaaatcatactcaaatgcttaaagatttaatcagtaataaaggaaatattccatcaagtctcatggtatacaatttggcaggaactaattcatatgatggtgataaaattgttccatttgctagtgtggagactggtaaatatattttccaagaaaccgctaaacactatacccaactaacagtaactggtaataatgctacacattctgacttgcctgataatcctgaagttatccaatatgtcgcagaaaaaattcttaaaaatgagaaaggtaaattaccaaaacctcactaaagctgtaaaatagcaacgcctctggtattttgatataatatattgcgaattaaactaaataaaaaaggatattattatgaaactcatttcatggaatattgattccctcaatgcggcattaacaagtgaatcaacacgtgctttaatgtcacgccaagttattgatactttagttgctgaagatgccgacatcattgcgattcaagaaactaaactgtctgccaaaggacctactaaaaaacatttggaagtacttgaaacttacttcccagaatatgatttggtttggcgatcatcagtcgaacctgctcgtaagggctatgctggtacaatgttcttatatcgtaaagggttaaatcctattgttagcttccctgaaatcgatgctcctactacaatggataatgaaggtcgcattattactctcgaattggaaaactgctatatcacacaggtctatactccaaatgcaggtgatggcctaaagcgcttagctgaccgtcaaatatgggatattaaatatgctgagtatttagcaacattggatagtcaaaaacctgttctagcaacaggtgactataacgtagcccacaaggaaatagacctagctaatcctagcagtaatcgtcgttctgctggattcacagctgaagagcgccaaggctttacaaatctactagccaaaggttttacagatacttttcgttaccttcatggcgatgttccaaatgtttatagctggtgggcacaacgaagtcgtacatccaaaatcaacaatacagggtggagaattgattattggctaacaagtaaccgtgtcgcagataaaattaccaagtcagaaatgattcattctggtgatcgtcaagatcatacaccaattattttggagattgaactataaaccaaaaaaagatgattgagttataactcaatcatctttttatactaagttgaggtctttatacttagtacggtagccaatctgaagaattttattatctttaactagcaatggacgcttaataagcattccatccgatgccaataagtccaaagcttggtcaagagttaaatcatcaaatttatcttttaagcctaattctctgtaagaatttcctgaagtattgaaaaactttttaaggtcataaggcgaattctctaacaattcttttaataacgaaactttgggaggattgctttttatatcaatcgcttcaaaagtcaagccgagttcagttaactctttttttgctgaacgacaagtggtacatttggggtattcataaaacgtatacatattatttctccttttcgtattctaataaccaagattttctttctaagccaccagcataaccagttaattgaccatatcttcctaaaacacggtgacaaggtataattagagaaatagaatttttacctattgctcctccaacagcctgtgcagattgacaatttagctctttcgctaattctccataagttttggtatctccaaaagggattttctgtaattcctgccatactctcgtctgaaatgctgtccctctcaatgataatggaatactaggtaaattttgctgtgaaaaataagcatctaaccacttcttaccaagtaaagtataggaatttgacatattaacaatttcctcttggttgactgctagcatatcatatttttgcccaacaaaataaagccctgataaacctagattgtctgctagaaggcgaatttctccaagaggggactgatagaattcttgatataacatatgataagcataacttaaaaagccatgaaaagcaattcatgactttttagttctttattgttgttttgcaattaaacgtacacggacgatattctcatcaccttcaaattcttcaattaaagtagaaatcttgttattatccgtttcatctaaatctattagtgtgtaggcgtagtcaccctttgaacggttaataatgttatcaatatttatacctaactctgatacagcagttgaaattttagccacaatgttaggaacattcttgttaattaaagtaatacgaaatggtgcggtttgaatttgatgtacattggggaaattaactgaattagtgatttctcctgtctccataaaacaacgaatggtttgacttgccataatagcacaatttagctctgcctcatctgttgatccgcctacatgaggaaagactgtaattcctttttggtttaataattctttgtctccaaaatcagtaatatagcgcttgacaacaccagtttctatcgcttcaaatagctcttggttattgactaattctgcacgagcaaagttgataatcgtagttccttttttcatgattgaaaaagctttcgcatcaaaagtatgcttagtttcatttgttaagggaacatgaattgtgatatagtcacaagtttcaaaaatatccttaatctctttaaccctttgaacatggcttgaaatattccaagctgtttcaattgaaacatagggatcataaccaagaactgtcattcctaagcgtctagcatcattcgcaattctagctccaatggcaccaaggccgataactcccaatttttttcctgcaatttcattaccagcaaaagctttctttcctgcttcaatttgtttgggaatatctgttccagttagagtattaacccatcggttagctcctaaataatcacgagctgaaagtaataaggcagcaatgaccgcttcttttacagcattagcatttgcacctggggtattaaacacgactattccctgtgcacttgcctcttcaataggaatattatttgttcctgcacccgccctagcaatagctttgaggttacttgggaaatcctgattatgcaaattttgactacgaataatataggcatcaggattttctgacatatccccatcaatctggaaacgattccctaactcttgtaaaccaatttgattaatattattaaatgttttgacactaaaaaccattctttttcactaaggttatctctttagtcatcattgaccaaaataacccctttctttttttcttacatgggatttctttcatcaatctcacgatagatgctcgtttctcccttttcttttatcttctgataagccaatcgtaccccatctagaggtactttaccacaatattgatagcctaatttatttagaatatgctgcatagtgacatttttttcatgagtatcgcaacgaaaatcaggtcctttatgaccttcaattaacccttgaaggaatgtctgtgctagtcctctaccacgaaattgatttgagatcgcaatacgatgaaatgtaagatagcgatggttatcatggagccattttccctcataaatagcatcataaacctcttcatgaccatcaatgacagccgcataagtcgctagcatcccatcttcaataccaacccaagcataaccgttcaagatatcatcaataatatcgttacgattagggtatccatcttctttttgccattgatcacttcctgttttagcaatttcggcacgcgcttcctcaataagaagcataatttggtcaatttcatttggaaaagctaatctgatttgcattatattacccacttttatatattatagactataataacggtttaattttctttcgtgataacatttactatgtattttctgcttcaaatgttttcataaaatcaattaattcgatgacaccttgtttaggaaaggcattataaaggctagctctcataccacctaccgaacgatgtcctttaatatttttaaatccacgttctgtcgcttcctttacaaatttttcatctaaatctttattaatagttatgaaaggaatgttacatagagaacgactctttttatctctgacaggattactataaaattctgaggaatcaatataatcatagagaagtcctgatttttcacgattagctttttccatagcatcaacaccacctagacttttcacccattcaaagactaatttagcaatgtaaatactgtaagcaggcggcgtattataaagagaaccagcatctgactgaatcttataatccaacattgatgataaagttggttcctcattaatcatatcttcacggataataactaccgttacaccagcaggtccaatatttttttgagctcctgcataaatcattgcaaaatcttctactttatattttacagctaatatattagaagacatatccgcaataacaggcacttcattagttttaggaatatcataaagcgatgttccttcaatggtattatttgttgtcacatgaacataggcagctttaggatcaatctctttttcatcaaactctggaatataatcataaactgattcttctgatgaagctaatagaattggttcaaaaggaattgtttttgatagttttacagcctctgtataagcttttttccccccacgaaccagcaacatgatagtaagctttacgccctctggcaatattcaagggaatcatactaaactgtaaggatgcaccaccttgtaaaaagattactttataattatccggaattcccatcaaatctcttaagtaacgctcagcacctttgataatatcatcaaactctttggagcggtgcgatacctccaaaacactcatactagacccttgataattaaggagttcagattgggcttttacaagcactggttttggtaagactgcaggacctgcagaaaaattataaattgtcatataacacctccatataattgtgtaagattatagcacagtattttgaatattgtaaagatttttttgattaattttgctttttattcgtgatataatggtaaaggcgaacaatcaagtttaaaggagtaatttatgattttgagggaattttgtgcagagaatttaacagacttaaccagattagataaagctattatttcacgtgtcgagctttgtgataaccttgctgtcggaggcactactcctagctacggtgttatcaaagaagctaatcaatatttacatgaaaaaggtattagtgtcgctgttatgattcgtccccgtggaggaaattttgtatacaatgatttagaattacgtattatggaagaggatatcctacgtgctgttgagttagaatcagatgctcttgttttgggaatattaacttcaaataatcatattgatactgaagccattgaacaacttctacctgctacccaaggtttgccacttgtttttcatatggcatttgatgttatcccgaaatctgaccaaaaaaaatcaatagatcaattagttgctttaggctttacaaggattctcctacatggttcatctaatggcgaaccaattatagaaaatatcaaacatatcaaagcattagttgaatatgctaataatcgtattgaaattatggttggcggcggtgtgactgctgaaaactatcaatatatttgccaagaaactggggttaaacaagcccatggtactagaataactcaataaaaaattcgaaacagggctataagtttctttagtatatttactactaagttctctcatgttttctaaaacctgaaagaaccggaataagagcataccatcttttataacctactctcagaaataaaatccaatttgcaatggtattcaaaagagctgaaattaaaaattttaaggaaattggaagtatcttacttctttattccaatagctaaatcggagattataaaaggttgccaaatttttctttggcaacctttttatattattacttataaatcatggaaactagcatagagttcttgtctattgagattaaattcttttgctactttttttatcgcttgattagttttatcaccattagcgatatattcttttactaatactagtggatcttgttggctactgtctttcactcgctcggtatctctcttaccatcaacaataattaagcattcacctttgagagggaccttttcaatatgctctaaaagttgactaatggttcctctttgatactcttcatagagtttcgtcaattcgcgtactaaaacaacttggcgatctccgtaaatctctttcatgtgttttagcgtatcagagactcgaaacggtgactcataaaagatttgtgtttcagggtaatcttgctttgtttcaaagaaagttatttgttgacctttcttacgaggtaagaagccataaaaaatatgaggttgtggagctaaacctgaagcgatgagagcagtaataccagcgctagctcctggtatagatacaactgggatatccccttcaatagcagccttgacaaggtcatgtcctgggtcagaaatagagggcattcctgcatcagatacttgggctaaagatttcccttcttttaacaaatcaattaacccagagattttatcgtaagcattgtgttcgtgaaaactaatttgtttagtagtaatatcaaagtgcttgagtaaaagtcccgtatttcgtgtatcctctgcacaaataaaatcaacttctcttaaaatcctaatggcacgaaaagtcatatcatctagattaccaattggagttgggactagatagagtgttccgtaatgtatatttgatttaaaacttttttgaacttgcatttccatcaatctctatataataattcaatacaaaaagcacattcttcgtcattttcacgacgttgaccatagaaagtattacaaatgtgaaagccatcattgtaaatgccttcgagtaattctcttccttgtttagaatttttaactgcagtttctgtttctgcttcaataacgctcagacgctcacgaagtttaccattttcaatgcgtagaacagtattctcctccaataatttttggatttgttttttcatagtctcaatttcagacaacccaactaataaattttgtgaaaaatcatcaaaggcatcaaacaagtcttttttatccattcactcttcctctctgcgcgtattattttctaagaaagcaccatatactctaaactattttgaaaactaacattgctcttccacatttgctgagctctataagtattttctaaatcataaagttggccttctttagccagcattattgtcagccattgaaaaacaaatgcctgatcatttttatctacaacttgcgatgtcaagcgagatacttctaaataagcagtttgcctatcttttgccaaagtcgtcacaaactgttgacttaaattcaagtaatctaataactttttgttagtcaacaatatttctaaatgtttaggatcgtctgctacttgagctaataagctagcttgtgattttagcaatcctgcttgttcagcttgatgaaccaacatgtccaattgttttggaaaacgaaaaatttgcgttctactcttaattgttggcaaaacattgttttcatcattagtcaataagatgacataagatgaactttgaggttcttcaataaatttcaaaagactgttggctgcattgacatgcattttttcgcaatctttgatgataaagacctgtgatttcccttcgaaacctgatcttgaaaaatctttagtcagctcttttatagtctctgtcttaataagttgcccctgtggttctatgattttaacatctgaaaattccccattagcgattaaacgacaggctctacactcttgacatggtaaaccactctggcgcttttcacagaactgactttgtgctaaataaagtgccatatctagacttgcaaaatttcccgaaaaaagataggcatgactcatcctatctgactgtaaaatagtattaaacttttccagcaatttgggttgtgttcgctttaaatccatgacctttgtacttcctgattcattggttgatacgatctaaaataatagagaatgtctcagctattacttcatctagctgttgggaggcatcaatcgtcacaatgcggtttggctccgaatccgccaattcaaggtaaccttgacggacgcgttgatgcatatctaattgctcgagatctagacgatttacctccctttgaacacttttttgaatacgctctaaacctacttcagaaggaacatcaaaatataaagttaaatcaggtttatgactatcagtcgcatagtcattaagccattttatatgtgacttatctaatcctcttcctgatccctgataggcaacagaactatcaataaaacgatccattaggactattttcccttcttctagagctgggagtaccttttccactagatgttggcgtcgagcagccatgtaaagcaatagctctgtttttttatccatttgcgtgtgtttaacatctaaaataatatgacgaatttcttctgaaatagttacgccaccaggctctctggtggtgagaatatcttgtgataatttttctctgagcaagggtaaaacagcttctaaaacggttgttttacccgcaccatctgggccctcaaaagaaatcattagtccttttttcatggtacatcctttatttataattactactattctatcaaaatttatcaaaaaaagacacccacaacttgattgtgcatgtctgatatttttaagagtaatttctcaaagtaagttccgtctgccctccaaaaccggaagttagtgtgaaaaggatttttatggtggaattaagtctgagacgtttgggttagaaatgagtttatccatcatgacaaaacacaaacacctaactctcttagaccgtaatgacatccaatctggtttggatagaggagaaacctttaaagccatcgggcttaatctactgaaacaccctactactatcgcaaaagaagtcaaacgaaataagcaactaagagaatcaaccaaagactgcctagactgtccgctactaagaaaagctccctatgtttgtaatgggtgtccaaagaggaggatcaactgtggttacaagaagaccttctatcttgctaagcaagctcaaagaaactatgaaaaacttttagttgaatctagagaaggaatccctttgaacaaagagaccttctggaaaatagatagagtgctttctaatgggggtcaagaagggccaacgtatctatcatatcctcaaaaccaacgatctagaagtgagttcttcaaccgtttatcgacacatcaagaaaggctacctatccatcacaccaatcgacctacccagagctgtgaagttcaaaaaaaggcgaaagagcacactccctcctattccaaaagcgattaaagaagggcgacggtacgaggattttatagaacacatgaaccaatcagagctgaactcctggcttgaaatggacacggttattggacggattggtggaaaggtccttctcaccttcaatgtcgccttctgtaacttcatctttgccaaactgatggattctaagacagctatcgaaactgctaaacacatacaggtcattaagaggacactctatgataacaagagagacttcttcgaactctttcctgttatcctaacggataatggtggggaattcgctagagtggatgatattgagatagatgtttgtggacagtctcaactcttcttttgtgaccctaatcggtctgaccagaaagcaagaatcgagaagaatcataccctcgtgagagacatactgcctaaggggacttccttcgacaacttgactcaagaggacattaatctggcactatctcatatcaacagcgttaagagacaggctctaaatggtaaaacggcttatgagctattctcttttacttacggaaaagacatcgcaagtatactcggtattgaggaaattactgcggaagacgtctgccaatctcccaaactattaaaagacaaaatctaacctaatcaactaactgatacaacctaaacgtctcacactaacttcaaccatagcggaacttaatctgaaacgctttcagatgaggatgttttcttgtaccctttttttgcgatttttaactctgaaaacctatgaaatcaagtattataaaaaccaacgaaacttagtctgagacggattttcgttggtttttattggtttttatcagactaaattccatttctactagaggtggaacttactttgagaatttagctgatatttttaagaaagtggttttttcatggtcttttctaaagtttccacaataacatcatcaaatactagttcttgttttaaaacatccttgtcagcgtatccttctagttgtatctcgaccgctttcttacctgcttttcgttcaataatgactaaacgtttaacacttaaatttgcactagaaagacgatttaggacttttgatagtacccctatcccctcatcagctaatataaccaagcgataactttcttgaccataccccgcaatttcaaggaaggctttaaaaacatccctatccgtgacaatcccataaagttgtccattatcaactactggtaaaacaccgatctttcgagacatcatcaaataaatagcgtcctcaaggctagcatactgtgaaacagtcacaatatctttaatcataatatctcgaatttttgtcttattaagaagatagttcatctcatatatagaaagactggttgctttagaaggttgtgcttctgccattgtcccttctgtcactaaccccactagctgatcattttcaacaactggcaaacgccttaagtggtgttctctcaataaatcagcagcttctgcaactgtagtatctggagagacataaactaatttttttgtcataaaatctttcactggcatacctgactcctctaaatattatccacctaagtaagctttacgaacttgatctgaaactagtaattccttacctgtccctgataaaacaaccttcccagtctctagaacatatgctttatcagcaatcgtcagagctttatttgcattttgttcaactaaaagaactgtagtcccttgttttttgatgtcttcaatgatattaaaaatttcttgaataaaaattggagctaggcccattgacggttcatctaaaagtaataatttaggacgactcatcaatgcacgccccatagcgagcatttgctgctcaccacctgataaggttgctgcatcttggtttttacgttcttctaagcgaggaaaacgatcaaacactttttttaacattttttgattttgttcacgatccttttgaagaaaggctcccatttctaaattttccataacagacaaacttgagaaaacgtggcgcccttctggaacctgagctaaaccattgccaacaatttttctagctgctaacttatgtataggtttccccataaaagaaatagaaccctgacttggtcttactaaaccagaaattgtcctcaaaattgatgtctttcctgcaccattggctccaattaaggttacaacctcaccttggttaacttcaaacgagacatcattcaccgcttgaataacaccatagtgaatagatagattttctactttcaacatggtcattatagctcaccccccaagtatgcttctataacacgtttattatttttaatttcttcaggtgtcccgtgagcaatcagacgaccatattccaatacataaattctctctgttacttgcataaccaagttcatatcatgttcaatcagcataatagtaatatcaaaatcactctttatttgactaattaactgcgtcaattctgcagtttcttgaggattcattcctgccgcgggctcatccaaaaacaatatttttggttctgttgctaaagcacgaacaatttctaaacgccgttgttttccataagggaggttcttagcaagagcatcttgatatgctttcaaaccaaaaatctctaatagctccagtgcctttttccttaaggctttttcactatgatagtatttgggtaatcgtaaaaaactagcaataggatgtgataagtgatgattactgagtcctactagtacattgtctaaaacagtcatatttttaaaaagtcggatattttgaaaagttctacctaaacctaaagaagctattttagctggtttcctcccatttaatatcttaccatcaattgatattgtccctttactaggaaggtatactcctgttaagagattaaaaagcgttgtcttacccgcaccgttggggccgattaagccaattaattcacctttatgtaatttcatcgaaacatcacctacagcagttaggccaccgaaatgtttacttaaattttttacttcaagaagtgccatctaattgcctcccttactcgtcttacgaaatagatgagatagagttaactctttcgttcctaataaaccgctaggtctaaaaatcataattaaaatcagggctaaagcatagataatcattcgaacagaagcgtagtcttgtagtaacatattcaataatcctaataaaattgctgctaaaactgtccctgtcattgaacctaaaccacctaaaacaacaataattaaaacattgacagacatcataaatgaaaagtcttttggcataacagttccaacgtagccagcctgtaaactaccagcgatagaagctaaaatagctccaaaaacaaaaacaattactttcacttttgttgtatccacacccatagactctgctgcaatttcatcttctcgtatagcaattgtattacgccctaagggactacgcaaaaaattcattgcaaggataaggctcacaactgccaccccataaactaaagaccaggttgtaaaaggcggaatccccatgatacccgcagcaccattcgtaatatcacctccattaaccaacaaaatacggataatctcagcaacacctaaagtagctatagctaaataatcaccttttagtctcaaagtaggaattcctacacctaaggcaatacctcctgcaacaagagttccaacaagtatagctatcaaaaaacctacataagttggcattttaacgccgataatagcaactgcataagcgccaatagccatgaaacctgcatgtcctagtgaaaactgtcccgaacaacctacaattaggttcaaaccaactgctaaaataacattaatcccaattgtttcaataatttgaatatgatagaggttaaatatacccatagatattagcacgctaatcaagagataatctaacactactatagctaaccaagataaaattgatttcatattttctttcatgcctagaccttctccttaatattttttccaagaattcctgctggacggatcaagaaaatgagaattaaaatagcataaacgataccatctcgaaaatctgacacaccaagtgcagtcgctaaagtttctaaaatgccaataacaaaaccaccgatagccgctcccggaatgataccaataccacctaagacagctgcaacaaatgctttcaaccctggagttacccccataagaggttgaacagaattataataaagcccaatcagtactccacctgctccagctaaagcagaccccagcgcaaatgtaaaactaatggtacggttaacattaattcccatcaattgtgcggcatcgctatccactgataaagctctcatagctttccccattttagttttttgaacgatgaactgtaaagtaagcattagtaatagcgcaatacctaaaatgatgagctgaacattggttatagttatcggtcctaaattatatttaacagtatgaatggcttgcggaaatgccctagtatccgctccaacaaggtataccatcccgtactccaaaagaaaagaaacaccaatagctgtaattaacgcggcaattctagttgattttctcagtggacgataagctaaatattcaattacaacacctaggaaagcagaccccagcattgcaattaataaagctaggaaaaaattaagatgaagatgattaatcaaataatagcccatgaaagcgcccatcatatagatgtccccatgagcaaaattaatcagcttaataatgccatataccatagtatatcctaaggcaagtaaagcatatatggatcctaagataagtccattaacgagctgttgaagcatattataaccatactttctattatatattattgtcgaattattctgaaaaattactttttaaaaaaggggagctgaaaattaaactcccatttttctagagaatacttattttgctgaaataatgttaacgctacttgtttttccatcctctaatttgacaacgtaagctgatttaacaacattgtgatttttatcaatagacattttccctgtcacacctttaaaatctttcagcttagctaaagcttttttaatatcaattgaagttttagctcctttagcagatttagctgccatatacacagcgtcgtatgataaagccgagaacatggatggttcttcaccatatgccttaacgtaatgatcatggaaagctttagctttggttgatccttgtgtagtgaaacctgtcaaataataaacgtttgaagctcctacaggtgttgccgattgcacaaatttcggactatcaaaaccatcaggcccaagaaccggtttagagatacctaaatcacgcgcttgcttaactattaatcctgtctcggtatagtaacctggcatcacaatagcatcatattctttccctttcaacttagtcaatgacgcttggaaatcagtatcaccagcggagaatgtcatactatcaacaatttttccactataactttccttaaatgattttgctaccccctttgagtaatctgatgaattatcataaaatagaacaacttttttagctttaaggttgtctgtagcatactgagacaatagctttccttgataattatcgacaaaagtagctcggaagaaatactgatttaaggtttttccatcagaaccatagactaaattgtcttgtgtcgcagcaggtgcaatcattggaactgctgctgcatttacttttggagttgaagatgcagctgcacccgatgttgctggtccgataatgacattagctcctttggtaaccaagtttgtggcaaccgttgctgcctctgcattttctgatttattatcctgtgataggacttttaacttcttgccgccaacccctccagcagcattaatttcttttactgctaagtcagctccattcttcattgaatttccatacgaagaaacgtttcctgataattcccagttataccctaccttaatatctttccctatttttgttcctgtcgaagatgctcctcctccgacatttccacatgctgctaaaagaactgtactagctaaaacaagcgctcctaaactaagtctcttttccatatttttctccttttttgaaaatggtaactaaaataatacagaattatcagaatattgtcaatagtttttaaattgtttttttgaaaattatagaaactaaataaaaaagaaggacatctgaactccttctttctaataactactagtaaatatcttaacgatataagtttccaacaaaatcctgatcaatatcatcaattgctgataaccgaacatccttaacaaattttaaatgttttatctctttactaacgctaacaatatcctctttattaacataaatgactagatatcttaatctacgagaatgataatgaacatctccgtatttatataatttacgagcgtcacgattatagtaaagataaacgctcattcctaaacgctcttgtttattcaataattttttcctttctgcgtcatatctgtaattactaagattataacataattccaacaaataaaaaaagagttggtaaactcaaccacgccgtacgcatgaaaactttctcttcatccttttgtgcccggacatcaattttgaaaagattcctttttaaatcaatgatctgcttagcctctttctccaaataattggactaaataatcttccaaatggacagaaatataccgttgtttgcgacgataactgaggtcttttttaggaaataccatcactttgagaaaatataagcacatttttcggataagatttaggttaaatgcggctcttttatccaatgtctgatgatgatcttcatgataaacaacgtccaataaccagtgcatactctctatctgccaatgacctcgtacacaattggcaaatgtgaggacatccggcttaaagctaaagataaaataacgattctcttgactcagctgaccatccttatcaatcgtgttacgagtcatcccaataccacgtaacttatgccatttgggatggttttgacacaaccatttgatatcggaagacacccagtattctctaacttcaatctgtcccctagatttttcaacagtctgataatactgcgcattttcttggagttcttccaataagttgacatcactaaaataaagagcaatatcatcataaagtgtttcttgatttcctttgacggctaagcaatagtctgctttaccttttataatcgtatcaacgatagccgtctgcgtgcccattgcgtctatcgttacaatgcttttacggatatcaattgtccgcaataactgaggaatggcaacaatttcattacttttctcctcaaccgctacctgtcccaaactaagatgatgacccccatcataagccgttacaatatgaacaggcttctgatttttacctcgattgcctcgaatcgttttaccgtccactgaaatcagttgatgaacggcatctaagcttgtcaatgattgctcaaattgaactttaagctcttttaaacggtctgaattaacaagactaatcacacgctctaaggtatcatgagacggacaaccttcactcaaatcaacgtaggtcgcaaacaatggttcattcatttcaataaaatcttccatctccttccaggtttcaatgccagctaactgacaaacaaagacaagaaatagaatggttgataaggggtagcgaattttccaagattgacgactatccaattcaactgcgcaatcatcaatagaaataataaaatcaatcatcgtagtcacctcatctatagtgtactactttgattgattttgtcattatgaatctagttttctgaaaacaaaagtttcttcatgcgtttggcgtgtaaactcaactcttttaaatctattattgtaaattattattttccataatagcatcaataaagccataatcaagtgtttcttgagcactcatccaacgatcacgctctgcatcatcatggactttttcaatagattgaccagaattatcagctaagattttttctaaagtatgacgcgtttttaaaagatgctcagcagcgatagccatatcagattgctgtgtacctccgcctgttccgcccattggttggtggatcatatattctgcattcggtaacataaaacgttttcctttagcaccacttgaagcaataatggttcccatcgaagcagccatccccataacaatcgtctgtacgtccgatttaatgaagttcatggtgtccacaatagcaagtccagccgatactgaaccacctggtgtattgacataaaggtaaatatcctttgtattatcttgtgcatcgagaaacaataactgtgcaatgatactattggccatattatcctcaacttggcctgtcaacataataatacgatcttttaaaagacgtgagtaaatatcataagaacgttcaccacgacttgtttgttcaataactactggaatcatatctttctccatttctttttatcactgtcactattataatcatttggtcaacaaaggtcaaataataacttttttaagaaaaggctttctgagttcttcagaaaagccttattcatctcaaatcttattttgtaccaaataagcgatccccagcatctccgagtccaggaacaatgtagccatgttcgttgagtttttcatccaaagcagcggtataaatatctacatctggatgtgcttcttgaagtgctgccactccttctggagctgctactaaacaaacgaatttgatactagctgcgccacgtttttttagagaatctactgctaaaatagcagacccacctgtagcaagcattggatcaactacaaaaatctgacgttgatcaatatcttcaggtaacttaactaaatattcgactggttggaaagtctcttcatcacgatacataccgatatgaccaactttagcagctggcacaaggcttaagaaaccatcaaccataccaatacctgcacgtaaaattggaacaattgctaactttttcccagctaattgtttttgtacagttgtcgctactggtgtttggatttcaacatcttctaaaggcaaatcacgagacacttcatagcccattaacatcgcaatctcatcaactaactcacgaaaatctttagtagatgttgtagtgcgacgtaagattgacagtttatgttgaataagtggatgtgaaatgacttgaaattttcccattataatgaccgctttctatttaattttgagcattaaaaacattctaatgcttgtttacattcaaagtattataacataaaaaccctttccatgcgactttttttatagtctagtcattttttctaaagtttgtcactaatcgcaaaactgcctcctcaataacagacctaggagctgcgacattgattctagcatgttttttcccttcttttccaaaagttaaaccatcatttaatattaatttggcatcatatcgaagtttttcttgaatttctaaatgcgttaaattataagcagaaaaatctaaccaaacaagataagttccctctggtttcatcactttgatatgagttttttgcgttaattgctcataaaggtattctattgatccttctaactccatttttagggcctttaaccattgtttctcttttgtaaaggcaacttctgtagctaataaccccaatgaagaaatttcttgttgattgttagctatttgcctcttcttaaaatccgagcgtaacttttcattttcaattattgcaaaactatttttagtccctgcaatattaaacgttttagttgcactagataaaataacactcaattctttaaaactagaatcaacagtattaaagctatggtgtacattatcaaataataccaaatcttgatgtatttcgtcagaaacgaggataacattatatcgtttacagatatctcctattttttgaatttctccttttgtccagacacgcccaccgggattgtgtggactacaaaaaatataaagctttacattattttcaatgatatctttttctaattgtttaaagtcaatctcaaaatactgattattattaagtaaactatttgaaactaaatgacgattattgtattttatagttctagcaaagggcggatagactggggtattaattagaacagcatctccctcctttgtgaaggcttgtatagcaactgaaatcgctggtacaaccccatcaattaataataatgattttttatcaaattgataaccatgttcttgcacttcccaattagagatagcttggtataaactgtctttaggactatcatagccaaaaaccatttggtgtgaaaaatcttcaatagcctccgacatttctggaaagataggaaaatccatatccgcaatccaaaggggaaggatttcttgatctttttgaaccgccttccattttatggtattacttgaaaaacgttctggtaaacttgtgaaatcatatgtaatcataattactcctgactattctacagctaaaaatatcccttgtcgccttggtgactattttaccatttgtttttgatactatatactaattaacattctaaagataaaagtgaccattttaaacgatcactttctttattattttaatttatcattttcataagtatggcttaattctaaattaggaaagctttgctgcctaagggcttcataaacaatcatacaaacagtgtttgaaacattcaagctacgcacatgctcatcgttcatgggaattcgtaaggccttttcggcatgctcgcgcataaaagtttctggcaatcctttatcttcacgaccaaacataaaataatggtcttgatcatcattgtaattttcatctgagtaaaccttgtcagcaaatttgctaattaggtgaactttccctcgacatgacaacataaattcttccaaaccatcatagaaactaacatctagcttatcccagtaatccagtcccgctcgtttcatttttttatcatcaataggaaatcccatcggtcgtatgatgtgcaaaggagcatttgttgccgcacaagttctagcaatattaccagtatttgctggaatctgtggttcaaataaaacaatatgatttcgtccgctatcggaacgatgatttttctgcgttagtgtttcaatattcatctcatcatcactttctagaactcattctgactcgcaaaaaaaccacactgctcggagtcaatctcagcaaacaatgtggtttatggtggtttgttaacttaaatcataacaggtttgatttaaactaacaaatcgttgacactattatagcacttcagtctacaaagtcaacctattcatgagtttttgggttatttttttgatagatataatgacaaatcaaacagaataataagcaaaaacattggaaaattaaaaccgtaaagaaattacttaacaaactcccgataaggaggatcaaaccgcctaaaattgctagaatcggtgaaactaagccggtaaatttatttttaatatcttttttgagataaaggctgagtactaaaacataaagaatgattaaactggtattattaaacaccacagcaatttcactaatatcactacccggcaataagttaaattttgtaaccataaaatgaacaaaaagccaaaaaatagctacagccgtcaccgtcaaactagctggcaatgacatttgatacttcaaatttatgttagccatcctctcacttttgatccatccgcgttccgcaaaagcttgaggtagacgcatcgtcccaagtaaaagtccattggcaacacctaatacagatagaataacaatgaaagataataaacgcccaacactaggaccgaaaataatattagctgcataattaatagcatcattaccggttgtcataataaagctagcacctaaaatttgtgtcaaaccatagaaaaatgccaaatatgataataagataagcgctggaccaatgacaaaggcaagtggtaaattcttcttgggattcttgacttctggtgcaatattaacaaaaattgtccaaccatcatatgcaaaatacaatggtaccagacctgacacccaactccatccaacatttgacggttgaatagctgttaaatgttgtggaagttgtggagctttatcagaccaaaaagcaccaattaaagcaattagaactaaaggaatcatttttacaaaggtcgttaaagattggaatccccctgcaatacgcttagcaaagatattcatgagactaagcgctaaaatataaacagcagctaaaataatctgtgattccaaacttgatgattcacctaaagtataaaatgcagctacccatgaaacgattgctgttaaagttggaagatacaaaaaagacgcaaacaagcctaaagttgctgctaaagctgggctaacatatttttcgtagtaagaaaaaataccaccactttcactcgttctaatagctagctcagaaattgacaaacttccaaaaacaatcgaaaaagaacctagtactaaaattaccatgcctaaaaagacatctccaccagtaaatttaaggatgtcatcaactttaaaataaatgcctgaaccaatcactacacctacaatcatagcaattgtagtcattaatccataggtctgtttaatagaattatgattctccataatatctccatttctactgtacgcttaaaggttaattataacctaatttagggcttgtcacaagtttatctgtgttatttttcaccagattctgataagagaatcatattactcttatcagaaagatgaaaacgttttttaaccataattctcgtgcatttttactaaaaaaaaggtatcatagagtttattattggaggtaaaaatgagaataattgttgtcggcggaggtaaagtcggaaccgcactttgtcgctcacttgttgctgaaaagcacgatgttgttttaattgagaaaaaagaaaacgtccttaaacgtgtcactaaacagcatgatattatgggaattgttgggaatggagcaaactataaaattttagaacaagccgaagtcaaaaattgtgatatttttatcgctatcactgatcgagatgaagttaatatgatttcagcagttcttgccaaaaaaatgggggcaaaagagactgttgttcgcatgcgtaatcctgagtattctaatccttacttcaaagataaaaactttcttggcttctcttcagttgtcaaccctgaattgttagcagcacaatatatcgctaataccatagaatttccaaatgcaacttcagttgaacacttcgccaacgggcgtgtgatgttaatggaatttaaaattttagaaggaaataaactctgtcatacttcaatgagtcaaattcgtaaaaaatttggtaatattgttatttgcgcaattgaacgcgatggcaaattgattattcctgatggcgatgcaactatccaagtcaaagataaaatctttgtaactggaaatcgtattgaaatgatacttttccataattacgttaaaaataaagttgtcaaaaacttgatggttatcggtgcaggacgcatcgcctactacctactcaatatccttaaaaataccaatacacacgtcaaactagttgaactcaaccaagagcaagctgaatattttagtcaagaatttcccaatgttcctgtcgttcatggggatggtactgctaaaaatattttgttagaagaaagcgttacaagttttgacgcagttgctactttgactggtgttgatgaagaaaatatcattacctcaatgttcttagaaagtatcggtatccctaaaaacattaccaaagttaatcgaactagcctactagaaatcattgacgataaacaactatcaagcattatcacacccaagcgtattgccgtagaccatgtgatgcactttgtacgcgggcgtgtaaatgctcaggattccaacctagaagctatgcatcatattgctaacgatcgcattgaaaccttacaatttgaaataaaagaaactagcaaattagcaaatcgtagccttgcatctttaaaattaaagcaaaatattttaattgcagcgattattcgcaataataaaacgattttcccaactggtgaggatgttttaacagtgggtgatcgtatcgttgttatcaccttattaaaaaatattactagaactagtgatatgttagcgaggtaggaatatgaataaaagtatgattcgtttccttctctcaaaacttttgctaattgaagctgctcttctagcgattcctctaactgttggacttatttaccgtgaaccgcaaagtgtcatgatgagtatagtcattaccatgattattttaatcatccttggattactgggttctctctttaaacctaaaaattatcatatctacactaaagaaggcatgttaattgttgcactctgctggatactttggtccttctttggcgcccttccatttgttatttcagggcaaatccctaatattatcgatgctttctttgaagtatcttctggttttacgacaacaggagcaactattcttgatgacgtcagtgtcttatcacccgcgctcttattttggcgtagctttacccatcttatcggtggaatgggggttttagtatttgcccttgccatcatggaaaattctaaaaatagccatttagaggttatgagagctgaagttcctggacctgtatttggtaaagttgtctcgaaacttaaaaaaactgcacaaattttgtatttgttatatcttcttatgtttgcagtatttgcagtaatattatattttgcaggtatgcctttctttgatagtattatcatagcgatgggaactgcaggtacaggtggttttgcagtttacaatgatagcattgctcattataatagtcctctgataactaacttagtttctattggtatgcttatcttcggggttaactttaatctttactatcttcttttactccgaaaaattaaagcattctttggtgatgaggaactaaaaacctatctccgcatcgtggcaatagcaactttcatgattgctctaaacgtcatcggtatgtatgataattttcgacaaggcctcgaacatattttctttgaagtatcagctattattacgacaactggttttggcgtgactgatatcactcgttggcctttgttttcacaggttattttgctattcttgatgtttatcggtggttctgctggctctacagctgggggctttaaagtcatgcgtagcttaatcctagcaaagattgcacgtaaccaagtattgtctacactctatcctaatagagtcatgtcactacacattaataaaagcgttctagataaaaatacacaacatggtgttttaaaatatctaactatctatttagctatcttcatggcactcgttcttgttttaacgcttgatactaatgattttttggttgttatcagtgctgcagcctcatgttttaacaacataggcccactcttaggtagcaatgaaactttctcattctttagtccattctcaaaactccttctttcatttgctatgatagcaggacgtttagaaatataccctgttttattgatgtttattcctaaaacatggtcaaaactataattacaaataataaaacggatatatcaatctgatatatccgttttattacgtcttaagctaaaatgatcagggacaggatcatttcctccgtgggctaagggatgacatcgcaaaatacgtgcaatccccatcaacacaccttttagaccatgtttttgaatagcttctatcatatacgtagagcaagttggacgataacgacagctagctgggaaagctggagaaatatttttttggtaaaagcgaactaagaaaatcaaaaaagatttaagcattaagatttattaatagccgcattatgcaactgactaatttcttttttatttaatcgtcgtgcttccccaggacggagacccgttaaatctaaggtaccgaattgtgtacgagatagcttgtccactaataacccaacttgttcaaacattttcttaacttgatgattacgaccttcatgaatagttaattcaactactgaacgatttttttcatgatccacttttatgatagtatagcgagcaggttttgttttcttaccatcgataacaacgccacgcgttaatggtcgaaggttttctttagtagctattcctttaacacgtgctaaataaactttatcaatttcattacgaggatgaatcattttatcagtaaaatcaccatcattagtcaaaattaaaagtccagttgtatcccaatccaagcgaccaacaggatatatccgttctttgacttgtggcaacaagtcaataactgtcttacgtcctttatcatctgagacacttgaaataacaccacgtggtttatttaagagataatataccttctcttcgttgtaaattggacttccttcaatttcaaccagatcaccagcctttacttgggtcgccaattcattaaccacttgaccattaatcgtgaccattccttgcttgattaattcctcagcttttctacgacttgcaatccctgcatgcgcaatatatttattaattctcattgttttccttatcttctgtattaattgaatccattgaaaataacgatacttcttcgtcaactaattcaattgaagaggcgtcaattaagtcatctaactgattaattcccatataatctaagaaataattagttgtctcataaaggttaggacgtcccaacacttctttctttccagcctctttaattaaaccaaaagctatcagtctcgttatagctccactggaattcacgccacgaatatcatcaatttcaatcctagtaataggttgtttataagcaataatagatagaacttccaaacttgcccgagatagactctgattaatcggagccttcgcataatctctcaacaaagtcatataactatcctttgttaccaatttataagtttgtgctgtctcaagcaataatagactagaatcgtcatcttcttcatatcgtttagccaacttttctagttgctgtattaatgctgatggtgtcaaagacaataattctgccatttgacgcaaactcagtccatcttcacctgcaacaaaaagaagagcttctattgagcctaaataagtcatttctcttcctttcttaagataacttgactaaaattactgtcttgttctactgtgatttgatgtaattttatcaactctaacattgccaaaaataaagttatcatttcagattttgtttggcaatccgcaaacacttcttgtaatgtcgttttctttttaagattaaaatgtctttcaataacgatcatcatatcttcaatacggtagtcttctttctcaattaccgtttgactatttgacaattctttttgtttttgggacatcatttgagaaaaagtcaaaaaaagatccatcaccgatttatcgtgtagaagaattgcatcttcaaagataacttcttgttttggttttgaaaaatatttggcgcgttcctgatgctgattagctaactcttcacttagcactttaaaacgtctatattcctctaattggctcaacaattccatttctggatcatcttcaataggatttgactccactactttaggtaataagttacggctttttatcaacatcagctgacttgccataagcatatactcaccagctacttctagacgcatcgcctgtaatgttgctatataagcaaggtactgctcaataacttccacaatcggtacatcgtatatatcaacctcatatttagatacgaggtgcaagagtaagtctaggggcccctcgaaatcttttaacttaatatccattatctataatatctctctaaagtgataggagtttttaagcctagaaggcgactgagctccgtcatcgttttgccattttctttttgctttagaataaattgttctcgcagaagttgtgcagttagttgttgctcattcttctcatttaagaaatctgttaattgattaaaaaaccattgtctagaataaggcttaccgttatgctcaaagactaagtcaccatcttcctctaaagattccaaaagaaaaggaagcaagtcttctggaagttttaaaatacgcttcatctgcgatttttcaatacttaagatattaaaagttgtatcaaaatcagccttcttcaaattagcaatttcagccggagttaaacctaaagataaaatcaacaaagcaatcaaacgaccactcggataatcagtatcttgatagaaatttgataaatccattatttgagactttgtctgagccaaagtgattttttcagtctcttgtagtctgtaaaattccttcagcgttcctctattatataaaaagaaaagaaattgattgactgcagataactttcgcttacgagctgttaacttaaattcacttagagactgttgatacaatgccagtttttcagaatttacatgtccaccaattattttataaaattgctttaaatcatagtgataggacttacgcgaattgagagataatttcttactctcaataaaattattaatatcatttatcattgtttttaggagtgatagtatattcgtctgtaaaatcatgtaggaggctattaatagcttttaaaatcgatttacgggttataatgcctctaaaatcattttgatcactgataacaggtaaaaatggataatctacaatcttatgcataattgctgtcagagtagctgcctcattaatcggctcgatttttgtattaaccatctcaacaatatcagtctgtgccatctcccaatctgttaattgacctttagattggtagcccataatgtctgagatactaatagtacctacatattttttctctttagtgataactggtacacgtgaaaaaccattacttgctaatagtaacataacgtggtctgcattgtgtgtatccacaaaaatagcaacgtcttcagctggaattagatagtggtccaaatgatttagcaaaaacgactcaaattctttagcaatcatcttgataattcctttgtcaagttaggatagggttggtgttggcgagtataatactctaccaaaaccttactatctgttatagttacaacagcgtaaagcttctcatttattggtcctcttggctgcaaaacactacctggattgataaaaatagttttaccatttttccaagcatctgcacgatgaagatgaccatataaacaaatatccgcgtcttcttgctgagctaataaatccaatttatcccaggtaaaattaatctgatggagatgaccatgggtttgaacaataacagcattatctatttttgtaaccaaaacttccggataacctgaatcataatcacaatttcctgtgaccacatgaatgccttcccatataggatctgagctaggaagttcggaatccccattgtgaaaaatagcatccacttttcccaaataatgattctttatatcttttacaatgtcacgatctccgtgagaatcactcattacaactaattttctaattgccattttggaaatacctccatcaatttacggacagcttgcccacgatgtgatagattatttttttcttgtgcgctcaattcagctgctgtcctactaccttctccgacaataaagagcggatcataaccaaagccattttcccccttaggttccgtaccaatataacctggccactctgcttcaactaccaaactttctttatttggagctgacacgactaaggttgtatgaaactgtgctgaacgtctttctttgtcaaataccatggctaattcatgcaataatttggcattattacgagcatctgtcgcgtcaggacctgaaaaacgagcagaccatacccctggcaaaccacctaaagcatctacttttaatccggaatcatctgaaattaccatttttccagttaattttgaaatagtctctgctttaagtcgagcattttcttcaaaggtcataccagtctcttcaacttctggtaaatctgggtaatcatttaaattttcaactttgagtcctaatttcccaaataattctctaaattccttcgtttttccttcattgtgagtcgcaattaatatggtatccccaaaattattatcattctttaaatcaaagaatttttctaaagaagtgccctctttaggtaagtgaactaagaacaactgatcatcttcactaactaagatggcccctttatgttgagtcactttgatatgccttgaatactcttgattaatcatatcaacgaggaatgctaataattgaaaatccgaagtcatctgcacaacgtgaagctgtagaccttcaactttcaaagttgataatagacgatgaaaaacatcttggatagcttcgtaagattcatcattaccaaaacaagtaaaataattaaaagcttggaaactacctaaaaaccaattgccttcagttttactttcaaaaattgtttttgtcataatacgatacgctccacatttatttcttgactaagccattgttctgcaatttctttaaaaccttttgggctggcggttgtgtaaaagtgatgaccaccgtgtttattttgccaattatggtttatctcaaaatagttcaataaaacagaaatatcacgaacggtttctgcgccactatcaattaatttaacctcagcccccataacattttgaatgatgggacgtaataggggataatgcgtgcaacctaaaattaaagtatctaatttaccaactaatggggacaacgtttcataaaccacctttttggctaaactagaagacatctgatttgattccacaattggaacaaatttcggacaagcaagggataccacagcagtatttggagacaaagcttgaattttttgacgataagcatctgatttaacagtcatgggagtacctataataccaactttccctaaattagttgatttgatagctgcgctagctcctggtaaaataacgcctaaaacagggatgtctagtttttctttaatttcttgccaggcaactgcagttgctgtattacaagctataacaatcatcttaacatttttagtcaataagaagttaaccatctgccaggtaaactctctaatctgttgagcaggtctaggaccatacggagctctagcctgatctccaatgaagattacttcctcttctggaagttgacggaacatttccttaacaaccgttaaaccacctacaccagaatctagaaagccaataggcctactatccatttttattcctccaatattagtgactaaaagaggctggacaacagtcctagcctctctatacaataaccaatcagtcaaatctacacttgaccaagtttgcccaaatcttgtctagaaatctgatggactatcactcactatttcatcactaaacgcttcaatgctaaaacactcttattttttagttttgatagctgtttttgcgtgttttacaatattacggtatgtttgttgaactttagcttcactaggtttttgtcccatttgactcatcatttcacgaatagcatccggtgttaaacgagggtgctctccaatctctttttcaatttgtttacgagcaataaaaatgcctcccacgagaccaccaaacaaagcgacgataattaataaaatccaaatagttattgacatctattcattctcctcatttatttacatgactcattatagcaaaaaaagaaagagtttacaaatatatgtaaacaaaatcaaagcctctatcgtccttgtcacgtcaatacactattaaattttcactagagcatggttaagcacatagtcgagtcctttatcttatcctaagtgttttccccaacttttgtgtcatccatttccaaatgaagagagctatgtaaaaatctaccaatccatgtagcaaagagcctagtcctatcaaagaaaatagtgaccataaataagttgaactactgttagaagtcattgtgattatataaacagtaataaattcgagcagaccatgaattatgttaatagctacagcaaataacaatgtttgccatttactcatcaataaagagggctttgacttaatcaagaaagccgcaattaatgcaaatccgatatgtgataaagctctaagaacgattacaatcggaaaaccagctagtagaaatccaagtcctgtccctaaagctaccaatattgcaactggaacagatataaaaatacttaaaaataaaggtacatggcttgctaaggtgaaagaagcaggcccaataattattttagcaggcatgattataggaatcatgattgcaaaagctactaaaatagaagtataagaaaccatttgtgttgttttttttgacatttttatctcctttgaagctattatacaaaacaaccttacaggtgtaaagacacctgtaaggttatttgtctatgtataaaattcctgctttttttagagcctcacatatttggtcaaaaactgactgatcttgacaagaaatcatatgtgtatgtagaccatctgtcaaagaggatagcaattctgcattggaaacttttaatttagcagtaaaattatcaatgtctttttggctttgaatgtttaagggagcagtcagcatcccataaatagggtgctctacctccacattcataatgattccttgataccgcaaaataatttccagttcttcttctgtctgttctatgccatgctgacaaaccaatctagctgtgaattgatgagtacttagagcactggacataaggtatccttttggggtagaaataatatcacattgttgtgcacgcaataaggcaatatctccaacaatcacctgcctactaacactaaaaatctttgctaatgtgcttgccgatatagcttcttttgttccttttaaagtcgttaaaatattttctcgacgctcctgtgccttcatataacaaattccttctttggtgttatttcacaattaaaaactggctagaatatctaaccagttagcctcaatcatttcgtgcaaaaagacgaagaatatttaagaatagattaataaaatcaagataaaggcttagtgccatcgaaactgcccaaccatctgcgacttggccgccttggctattgtagacatatttaatcatttggttatcgtaagcaatcaatccagaaaagatgatgacacatacgatactaatgatataactcatacccccactaccgataaataaattaacaagacttgcaattaaaatcccaattaaagcagccattaacgctttacgcatacctgataaatcttttttagtcttagctccaatcaaagccattgcaaagaaaacagccgcagatgttataaaagcttgaagaactgtagtttgcgtgtaccttgcgataatgaaacttaaagtaaacccattcaaagctgaataaatcaaaaataatggtaatgcagctggtgtgtttcgacgcgccgctccactagcaacaaagactaaaaccaattctaagatgattgctccaaaatacaaccctggcattttttgcatgatggcaatcatattttgtggaaacatatacagcataatcgcagaaacagcagctgacaaacctactcctatccctacaagaccgtaaatcttagcaaaaaattgattcagccctgaatcagattgtgtgtaaatgacgttatcattcatatgtattttcctattctaaattttaatgattatgactacctaagaatttgcgactaaaacggataggtttcttaaaaatacgtttgagtggacgagaagcctctcgtactgcccaatacttatcaaccatagtcacaatataactttctttataacgtggcggtgcaatagtcgctccccacatgtgcttcaaaataatatcttcttctctagcgtttaaatcagttaattttcgcgcattacgaaccgctatccttggatgaacccaggcatggctcttgttaaatttcgttacacgccaatcataataaaagaaatcatgtagtaaaccacctcgagcagtactactcgcatcccaaccaaacttcttagcaattttataacttgtataactaacatttatagaatgctctaagcgagttgagtgatgatgttggacaatagcttcgagtttttggaaacgtggatggtcaataaggtgaccgaccaaatccatgaagtccttatcgtcttgatactttttcattataatcacccctctggggatattataacatatgaacttaaattaagctgaaaatgactactcccgcagctactgctacattaagactttctgcttgtccaggcatttcaatatgtgctaaaacatctgcttcttctgtcatagttttggaaattccctgtccctcatttcccatgattaaagcaaaataatcatatttagggagattcttataatttaccgattgttcagataaagttgtcgcaatcatagttatcccttctgctttacaaaagttaacaaactgctctatttctaccctaaatactggtaaatgaaagtgactgccttgcatagaacgaagtgttttttggttatacaaatcagcagatttctgagataaaaaaacagcatcaaaattcgctgcatctgcagttcgaaccattgttcctaggtttcctggatcctgcacatcttctaatacaagaaaacgtccttttttaatatctgtccatcttgtctcttgaaaggcaatctcagctacaatcccttgaggagtctgtgagtcagttaattctttcaaaacatcatctgtaacaacaatagctctctcgggttttctcaaacgatctattgccgtttctgtcacaaaaatatttaaaaattgtgcaccatatttttcagcttcctcaaataaatgccagccttcaataagatatgaagatttccgatattttttttgtaacaactttttcgtttttttaatgagattatttgattttgaagttataatagtagtcataaacctattatatcagaaaagaggtcaagttatgaaaaaagttcatttaattgtctcagggcgcgttcaaggagtcggatttcgctatgcaacttattccttagctttagaaataggtgatatttacggtcgcgtttggaataacgatgatggaactgttgaaattttagcacaatctacagattcaaataaaatgacacaatttattcagaaaattcgaaaaggaccttcaaaatggtctaaagtaacttatgttgatattaaactagataacttcgatgattttaatgactttaaaatgagtaattaaaaatcattctgcggaagtattgtttaattcttaaaaaaaaagtaaaatagataggtatattaaaaattagaggaactaaaaacattgaaaaaaacattgaaacgtatcttattctctagcttatctttgtctatgttattattattgacaggatgtgttagcgttgataaggctggaaaaccctatggagttatctggaatactcttggagtgcctatggccaacctcattacttatttcgctcaacaccaagggcttggttttggtgtcgctatcattattgtaaccgtcatcgtacgtgtcgttatcttaccacttggactttatcagtcttggaaagctagctatcaagctgaaaaaatggcatactttaagcctttatttgaacctattaatgaacgactacgcaatgctaaaacacaagaagaaaaattagcagctcagacagaattaatgacagctcaacgtgagaatggccttagcatgtttggcggtattggctgcttgccattactcattcagatgccatttttctcagctattttctttgctgcacgctatactcctggagtctctagtgcaaccttcttgggacttaacttaggtcaaaagagtctgacacttactgtcattatcgccattctttattttgtacaatcttggttgtcaatgcaaggtgttccagatgaacaacgtcagcaaatgaaaacaatgatgtatctgatgccaataatgatggtattcatgtctattagtttacctgctagtgttgcgctttattggtttattggtggtattttcagtattatccagcagctagttacgacttatgtacttaagcctaaactacgccgaaaagtagaagaagaatatactaaaaatcctcctaaagcctacaaagctaataacgcacgaaaagatgttacaaattcaactaaagccactgaatctaatcaagcaattattacatctaaaaaaacaaatcgtaacgccggaaaacaaaaaagacggggataaaacaagcatactaaataatggtgtgttgtcctaaacagttaaagattattatgtaattcaagtaaaaaagacttagttctatgtcctacatagctaagtctttttagttttgcctaacttttcatataaaaagcaccctaaaagtcagataaaaatctagcttttaaagtgcaagtaatctagctaacagactaccttattaataaagtaatcgtttttcccaccagtcttgaataattgcataaagcgtacaaattacccaatagataagggctactaagatataggcggtcatatagtcggagtaggttcccccaactattttagcattattaaagatatcaggtaccgtaatcatcgcagtcaatgaggaactcttgaccatatctagcaaaacattacttaaagaagggagtgcaattcttgttgcttgcggaataataatgcctctataaatcgtcggtgtttttaaccctaaagctctagcagcttcccactgaccatgatcaacagctaaaagagctgctctgataatttctgatatatatgcactagacatcatggtaaaacctacgatagaagcagtcacagcatctaactgtatccctataaaaggcaaaccaaagtagataagaaagagtagaaccattaaaggaatcccacgcattaaggaaatatgaatattagctagatacctcagtaagcggaaatgagacatcttcattagagctacaaagaatcctacgatagctcctaaaataaagccaaccaaggataatccaatggtatatggtaacccctgaataacacttggaaaagccttaacagctagttccaaattaaaaatggcatcccagtttatcacttatctactcctctcgaaattttttatttaactttaattactggaattttatccgttccagcaggttcttttgtgagatcttgaccagcataatatttttcagagatttttttcaaagaaccgtctttcttcatatccttgatagctgcatcaatttttgttttgaggctcttatcttttttactcatcacaataccttgctcagtcggattatacttcacatcacccatttttactttgatatctggatattgttttgttacatattttacagcaatgacttgtgtgtagtaatcattcggaatgaaatctgtacgtccagttgatacatctcgaaggtaaacgtcattagttacattgtcataaataacaggttcagcaccttgctgttttgcaattttcatatattgcgttccagcgccaccaccagcttttttacctttccagtcagataaatcttttgctgtaatctttgaagaaccatctgcacgtacaatcatacctccaacagaatatttataaggttgagagaaattgtattttttcaaacgctcgggagttgtgtcaaagttattgacagcaacatccaccttaccactatctacagaagtaaatgattcagcaactccaacttcaacaaacttaacttttatcttaagttttttagcaatcgctttcatcatatcaatctcataaccagtcaattttttatggtcatcataataacttgttggataaagcgttgcaggggtagcaaccttaaggacaccatcttttttaatattgtcccatgttgtttctttgctagattgaccatttgagcaagctgctaatgtcattgcagataaaccgactaaaccaagtaaaattgtctttttcataagtactcctgtagattaaattatattaaaatggtttggcgtactctatcgaaaattaaatttaatgaaaattaatacataaatttacgataataatacaaccattgttaagagtaccatattgtatccgttttcgcaaaaatattgtttacttttcaaattaatggtaaacaggccctttgaattgcttctctttttcaaacaactctgcaacagcaagcaataaatcttctctccctttagccgctgtcaattgtacacctaaaggtagcccctctttagttagatgagttggtatggctaaagaaggttgccctgtcaagtttggctgatgtgtaaaaggtgtccaggccattgagtcttcaaacattttccaaattaaatcctgttgttcacttactgagaattctcccatatgcctcaattgtttctggagtgtctcgtctaaatcaaattgtccatgaaaaggagctggttgattagttgctgctgttaaaattaaatcataattttcatgaaacctcgccatggtagctgcaaattgatcccatgaatctaagagtttactgtaatctttagccaataccctttgtccactctgatacatagcccaggtcattaattccatatcgctaaattccattgaacgccctaaactcttttcgatgtcatcaaacattgctgctgtttcaacgctattcatcatacaataagttttcatagaatgaataccatctaaaggttgttctactaattctaaatgattccctttttgagacagaaaatctgcggcttctttaatagctgctttagcctcacttgatacctttgtttttaagggagaatccatcaatactgctatttttaggggtttactaacgctaaactcgaaaagactctctttgctgagttttttcaggggaaatgggctttctacttgatatgattgtaaataatataatagtcgttttgtatctctaactgactttgttaaagcaaaatgactagaagccccttgccaacctctataggatgaaggtccaacaggtatacgtcctcgactcggttttaaaccaatcaaaccattaaaacttgctggaattctgattgaccctcctccatcactagctcctgcaattggaaccattcctgaactaacagctgcggctgcaccaccactagagcctccagcatttcttgaatggtcaaatggaagattaacattcccgtgaagttgaccatcactaatattcttaaaaccaaattcaggggtatttgttcttcctaaaataataaaccctaatttttcaaaggactgcactaaatagtccgtttgtttagcatgatagtgtttaaataattgtgaacctgaggttgagagttgtcctttttgattctgtcccaaatctttcagaagaataggaactcctgcaaaaggagcatttgattcatttgcgtatttggctgcttgacgcgcctcattatattgcttgctgacaacagcattaacgcttacattctgttcctcgatcttgtagattgcttgctctactaattcttgcgacgaaatcttatgctgttttatcgcttgtaccatagcggtagcatctttaaaaaccatataaacacctcataaaatgtatttttattataagataacaaaaaatacttaaaaaaatagaataacgtctagactctagatattattctatgatttatactattaatttgttttttcaacactaatgatttcaacttgatagctaccagcaggtgattcaattgtagctaagtctcctgtttttttaccaattaaagcatgagcaattgggctttcattcgaaatttttcctgaaaaaatgtcagctccagcagcaccaacgatatggtaagtatctttatcatttgtaccaacttcttggacaaggacagttttaccaattgcaacctcatctttagcaactgcatcactatcaataatttcagcataacgaatttttgtttctaaaatttgaatttgaccctcaacaaatgcttgttcgtcttttgctgcatcatattcgctattttctgataagtcaccataagaacgagcaatcttgatacgctctacaacttctggtctacgaactaattttaactcttcaagttctttttcaagttgatctttttccacttgtgtcattgggtaagttttttctgccattttatttctcttttcttttcattttttcaagtcaaagatataaacatgatgactcgcaccatgtttataagcttagttaatttgactattgatatatttttcaacgttagccttgtgtgtttcaaaatctttagcgtagtatacatttccggtcttcacatcagcgacaaaataaaggtaatctgttgaagcaggttttatagtcgcttcaattgctgagatacttggactatcaactggtccaggcatcaaaccagtattagtatagatgttgtatggtgatttaattgaagtattaatttgagcatcttcagctaaacttgttttatcacctaatttccccatagcatacaaaattgcaatgttactttgaagagcttgaccggctgataatcggttataaaagacacttgctattttacggcgatcttcgtctgttgatccctctttttcaacaagagatgataatgtcaaaacatcatttacagacatattcttcgctttaatagtgttatagtaaggtgccatcttagtattcattgttgaaatcatatcttcaacaagtccttctaaggttgtatctttataatagttgtaggtagctgggaataaatatccttccaattgataaatagcttttgatttatcaggtaaacttcctagtaaatttggatatttagctaccatttttttaataaacgtttcatcttgaacaagtttcaagaaatcatcagctttataaggtgtacttgtagtctttgtatcaattttattagactcaatagctttagcaatctgtttaatagtgtaaccctcggtaattaatatcttacctaaagctggttttgtcggttctgcagttccgcctttttccaattcagcagcaatctgatctaaagtcatactttttttaagattgtagtatccactttgaaaattactatagtttttgaacttggaatagtaattaaagactgtggcgctcttaatgactcctgctttttctaaaatttgaccaattaatttattcccagatcctatcggaatttcaacttgtacaaatttatttgaattggaatcaacaggtttaatagcactatctacaaaacgataacctacaaatgctgtcaagagcaatacaagtatgataattgatatcagaatacgtgcaattcgttttgccacattatctgctttctgacgtctttcacgcttgttatgtttgttcttggctgacaaagctataccctcttcttcttttgacaaatcctctactcggataggttcctttgctacgggctctaactctgatatctcaccaagttttacattttcaccttctgtaggaatatctgttgctctcacaagaaagatttcttccgtttcttgattaggcacagcagttgcaacatcagtcttatctgcttttaaatctatgtcaggtacattttcagttgtcctaaattcactagatttggagccgctatcaagctctcttgaaggttccatcccttgattgataacttgttcttcttgggaagctaatgcttgttccgcctgacgtctttcttcttctcgagcagcttctgccagaagtttcgcctcaatccgagccttctcttgctcttctaagcgttgcttagtctctagcgcctttgctctagcttctcgttcgtctttcaaacgttgcgcttcataatctgccatcaattgtgctgttctgcgagcagcttctttggcttcttgctctttttgatagagttcttcttcacgcaactttctcaaacggttagcttcttctaactctgccagaatttgttctttaaaacttttctgatcatggttagaatgctgatcgtcattaaattcggtcaaagagatttcctcctaataataatcacaggcaattatatcttaaatagtctataaaatcaacaaaactttgacaatgttatctacttttaacaaattgatcgtgttggattattccaaatcatattataccaaagcgaaccaccatgtttggagtcagattctccctcatctttaaatccattcatttcatagaaggaaattaaatcatcatggcaagttaaacttataccatctcgttcttgagaaacaaccaggtctttcatcgctgctaataatgctgtaccaatcccctgacctttaaaatcaggatgtattgatagactagtaattcctatgaaaccacctacccttacagggaattcagaaactttatggaataaatcgtccgttaagtaccgacctttaataaccggtccttcaatgtaacctgctaaacgaccattaatctctgcaactaaaaaagtatcagtcattatcgttaaacgttcttgcattgcttttttactcgcagcctctgcttctgaaaaatttatttgttcaatactaatgacttgctgtaaatcctctaggcaaccatttctaataatcatactcatctccttaatttctttatgaaattctcttgataaagtcagatagaggactgagaaacttctctcagcccttaccatcaacttattgtgtatttttagttaggttagctaataattcttcaaaagagcgctcatacaattgaatgtctccagcacccataaagacatagacagcattatcatgattgagtaaaggcgagacattttcgactgtcactaaatctgagtgtttgacaatcttagcagctaaatcttctaccttcacctcaccattatctacttctctagcagaaccatatatttgagcgagataaacgctatccgcttgactcaaggcatgggcaaattcgtctaaaagagctatcgtacgagtgaacgtatgcggttggaaaatagctacaatttcttttgacgggtatttttgtcgagcagcatctaatgtcgcaataatctcagtaggatggtgagcaaagtcatcaataatgacagtatcgtcaataatcttctcagtaaaacgacgctttacccctgaaaacgtcttcaaatgctcagctactaatgccatatcaattcccattatgtaaaggttagcaataacagcagttgcatttaagatattatgtttaccgtatgctggtacatgaaactgaccaatttcttcttggttatagaaaaccttaaagtcagaaccattaacagttcgagtgatgtcttttgctataaaatcatttgaatcttcaaaaccataataatatattggtgcctcagaagtgatttcatgaagttttggatcttctccataaatgaataaacctttttgaacttgcttagcatagtcattaaaggcattgaatacgtcctctaagcctgtaaaataatcaggatggtcaaaatcaatattggtaataattgagtattctggatggtacggcataaaatgacgttcgtattcatcagcttcaaacacaaagtaattagcattagcagaaccacgtcctgtaccatctccaattaggaaagaagtgtctgtaatattttttaaaacatgagctaataaacctgtcgttgaggtttttccatgtgccccagctacacctagactagtgaactgacgcataaaatctccgagaaattcatgatatcgtttaaattgatagcccttttcaataacataagccaactcttcattgttatctggacgaaaagcatttcctgcaataatctctaaatcctcactgatattattcggtgagaaaggtaatatagttacacctgcttgctctaaaccacgttgggtaaaataatatttgtcaacgtcacttccttggacgttatgtcccatttgatgaagcatcagtgctagggcactcattccggatcctttaataccaataaaatgataagtttttgacatggtctctccttaattaatgtctttaaaacgtgtcagatttaattcttgagccttggctctttctttatgaaactgattgtcttgtttattgtaaacttgactgcgtttcaaaaaatcaaaattatttttctttgtttttgggttcggtgtattatcaggttcttgaaatatgattggaatttctgctaatatatagctttcctgctgtaaacgatcagaaagatgacttagttcagtcacctttcgctgagtttgttttttcggtactgttgccttcaattgttgctgaaaagcttcctttgatggcgccttaaattcctgtttcgcatagtaagcttgtcgtttctcccgaacagacctctttgcctcttgtcgagatttgctcaactctgtcgctttttttacaaaactctgcggtggtacaggatcattttcaattaccttaggatgtgatatttcttcatgttcataattgcttttgaccatgctttgatatgttttttcttgataaaagtctcgaatgttgttaattaaatcttcattatcataaagattcatctttacaagcggagacattactggttcatcatctgctatcaacggaaatcgtctagagcctctattcacattatcacttcctttctacaacagacctattataaactaatttttctgttttttcaaagttttcaactaagtaaagcttatcagattggtatttttcattcatttatataaaaaagaaagcgagagaccactttcttttttatattatagtcacatcatcatatttatttagaaactccaagtatctctcgaatatcatctacgctcatgctagcatgggtttcatttccatccagaactgttgtaaccaaatgttttttagtttcttgcatttctagaattttttcttcgattgtgcctctagtaatcaagcgataaacctcgacattctctttttgccccaacctatgtgcgcgactaatcgcctgcatttcaacagctggattccaccacaagtcaatcagaacaacggtatcagctcctgtaaggttgagaccaacgccaccagcttttaaagaaatcaagaaagcatcttttgatcctgcattaaatgctctggtcatttcatgacgttcatttgctggtgtagaaccagtaattttataagttgtaagccccatagctaccatctcacgttctgcgatatctaacatacccctgaactgagaaaaaatcagagcacgatgtccattttccttaatttgtgttaaaagttgacgtaggctttctaacttaccgctttcaccatcataatccataaaaagacgtggagtgtcacaaatttgacgtaatcgtgtgatgccagataaaatttcaattttacgacgatttaagtcagcgtcactagaatgttggatactttcttgaatttggcgtaattgcgccaaatagataactttttgactgtctgtcatttcatttggatagttcatttcaatcaaatccggtaattctgggagaacttcttcttttcgacgtctcatcacaaatggtttgatataacgagcaacttgtttagggttcaacttcaaaaactctttcttaccaggtaataaaccaggtaaaatgatctggaaaatggaccaaatttctaacagtttattctcaataggtgttcccgataatgcaaaacagtttttgacctcaaaagatctcaagctatgggctattttagtttgagcatttttcataacctgtgcttcatccaaaattaaataatcataatttccttcagaataagtctcaaaatcctgcctaaatgatgaataacttgtaatgattacttgatgacgttcagcaataatttcatctctacgaatcttagaaccataggcaactgctacatctacgtctggcgcaaatttgtggaattcatcttgccaattataaattaaacttgatggtgataaaataagcacacgagaatctctagttagttttgtacttaaaaatgaaatcgtttgaagtgtttttccaagccccatatcatcagctaaaatccctgcaaagccataatgatctaacatacttaaccaacggacacctgtaagctgataatcgcgcaaggaagctgaaacagatagaccaggtattttaaacttttctgggtgtctcaaatcttcaatcaattggtaaaaatgttgtgaaaagctaacattatcttgatttgcaaacagttctgataattgaaatgctgcaatattatctaattcaatatgcccattctttgctcgtctagctctcaacccttgcaaagttgcacttactttcttagtttcttcatcaaaaataactaattgccctgatttattcacaaaataaggattattgtcaaacaaagctaccagagcttgatcaacatcgttttccagtaaatcagagaaatcaaaagaaatatctagcaggcttcccttagcttcaatatcaatttgcggtcgttctatgagacgataactttccaattttgcggataagctcactgttcccatttttttaaattgtggaagcatataggtataaaaatcgtataattcttgtgcactgtatgctggatggctggttgaaaagtggggtgcaaagccatatttttctaagagtttaaatactttttcttcatgtttgaagtgactagcaaatgttaactgttctagttcttgacgattatgaacagttaaatcattaccataatcaaataccatttgcaataaaatttcattttgactattaatatcgaactcaaaatttaccttaaaatcatgaatagagaagctccgtggagcatccactagtccaatctccttaaaatccagtaaatgagctgctaacttatcttgatcatctaaatcaaaatggatatgttttgctaaatctccctcaatgggaagactacgaatagccgttaccatcttttcttgcttcaaattaagatggtagaaagtatcgcgataaaacaaataagaattcgcaaatagtggttttaagtctttctctttgatttctaattcaattgattgcctatggacaataaccttaaattgataaagatgatcctcaccttctaattccttaaagtagaggtgattaaattgatgaaaatcactttcaaatgaaaaattttctaaagcattcatcaaagtaacaccctcttcaaaaaaaccacgagtgagactaaggtgacgaccttgatttggtaaaataaactctagatcaattttgcttgaatgacttggaatgagcctccataaaaattctatcaattcttgactggtctcatcaaactgtattaaagacaaagtttcaaagtattgttttccaatctgataataagcttcttttcgaacagtatttaaaaaggctttgatgtcacgaataacataacttctatcatcaggcagtcgtctaatttttaaagtccaccagatatcattagcataaggattttgttctccttgagccgataattgatattttatagtatcatcttcattaataattagactatctaaaaaaacactaccaaaagaggttttcttcttagtttcttgttgactttcttgttgaacttgaactttagataagattgctttaccttctggatcgtttttcaagaaatgctccagagcagctaaatgttgacaatagccttttcttgcaaaaaaatcacaagaacattttgtttcttctgttactaatgaatattcaatctgacaatccccaactttagcttttaatagattaccttcttgagaaatcaaggacaccaaaccttgttcgtagagttctataccttgatttcgaatacgtcctggaatcattctactcattatgctaccaccttcatcttatcccttaattataacaaaattcaagtccaatttcttgtaaaaatactaaattgacacgccgtacgcatgaaaactttctcttcatccttttgtgcccggacatcaattttgaaaagattcctttttaaatcaatgatctgcttagcctctttctccaaataattggactaaataatcttccaaatggacagaaatataccgttgtttgcgacgataactgaggtcttttttaggaaataccatcactttgagaaaatataagcacatttttcggataagatttaggttaaatgcggctcttttatccaatgtctgatgatgatcttcatgataaacaacgtccaataaccagtgcatactctctatctgccaatgacctcgtacacaattggcaaatgtgaggacatccggcttaaagctaaagataaaataacgattctcttgactcagctgaccatccttatcaatcgtgttacgagtcatcccaataccacgtaacttatgccatttgggatggttttgacacaaccatttgatatcggaagacacccagtattctctaacttcaatctgtcccctagatttttcaacagtctgataatactgcgcattttcttggagttcttccaataagttgacatcactaaaataaagagcaatatcatcataaagtgtttcttgatttcctttgacggctaagcaatagtctgctttaccttttataatcgtatcaacgatagccgtctgcgtgcccattgcgtctatcgttacaatgcttttacggatatcaattgtccgcaataactgaggaatggcaacaatttcattacttttctcctcaaccgctacctgtcccaaactaagatgatgacccccatcataagccgttacaatatgaacaggcttctgatttttacctcgattgcctcgaatcgttttaccgtccactgaaatcagttgatgaacggcatctaagcttgtcaatgattgctcaaattgaactttaagctcttttaaacggtctgaattaacaagactaatcacacgctctaaggtatcatgagacggacaaccttcactcaaatcaacgtaggtcgcaaacaatggttcattcatttcaataaaatcttccatctccttccaggtttcaatgccagctaactgacaaacaaagacaagaaatagaatggttgataaggggtagcgaattttccaagattgacgactatccaattcaactgcgcaatcatcaatagaaataataaaatcaatcatcgtagtcacctcatctatagtgtactactttgattgattttgtcattatgaatctagttttctgaaaacaaaagtttcttcatgcgtttggcgtgactaaattgattgttttttgatacagtaacaaataaaaaaggctaaaacaactgtcctaaccttctatttcaatttcaacaataagatgttatttacgtttacgtgctattagattaattggtgttccttcaaaaacaaatgcttcacggatttgattttctaagaaacgaagatatgaaaagtgcatcaattcttcttcgttaacaaaaacaacgaaagttggtggtttaacagcaacttgagttgcgtagaaaatcttaagacgttttcctttatcagttggtgttggattaatagcaatagcatccataatcacatcatttaatacagcagacggaatacgtttgttttgactttcgctaatacgtttaatcatatctggtaacttgtgcaaacgttgctttgtctctgcagaaacaaagataattggcgcataagacaagaattggaagttatcacgtatatcagcttcccactgactgacagtatgattgtctttttcgatagtatcccatttattaactacaataataatacctttaccagtttcatgtgcaaaccctgcaatacgcttgtcatactcacgaataccttcctctgcattaatcaccataagaacaacatctgagcggtcgatggcgcgcatagaacgcataacagaatatttctctgtgttttcatataccttaccagatttacgcataccagcagtatcaatcatagtatactcttgcccctggctatcaacgaaattagtatcaatagcatcgcgcgtagtaccagcaactgggctagcaataacacggtcttccccaaggatggcattaattaaactagatttcccaacatttggacgtccaatcaaactaaaacgaataatatctggattttcattttcctcttctaccggaagattttccacaatagcatccaatatatcaccagtaccaataccatgaactgatgacaagggataaggatcccctaaaccaagagagtagaaatcgtaaatatcattgcgcatctcaggattatctaccttattaacagctaaaataaccggtttattggtcttataaagaatacgtgagacatactcatctgcatcagtcacaccttctttacccgacacaacaaacacaataacatcagcctctgtcatagcaatgtctgcttggtgcttaatttgctccataaacggtgcatcaacatcatcaatcccaccagtatcaattaatgaaaacttacgatttagccactcacccgttgtatagatacgatcacgagtgactccttcaacgtcctcaacaatggaaatacgttctcctgcaattctgttaaataatgttgattttccaacattcggacgaccaacaatagcaactgtaggtaataccataattctcctctcactattgggaatactcccaattccattctattttattaacggcgattcggtccttctaagtggaattctatcgctaaataccgtacgcgctccataactcgttttgcttgccaagtttcgtcgcttccttttatattagcccattttctttccaaatcgttaaaactataatttgacgtaaagaaagtgggcaactcttctagcatacgatgttgtaatataacttgtaaaatctcgtcacgaacccaggacgttgcctgttcagccccaatatcatctaaaatcaaaatcggaacacttttcacagcatcaatttcatcttttacagttccgcttgaaatagcatttttgacatcaatagcaaaactagggaaatgaagaagagtcgttgacacaccctttctctctgataattccctcgccattgctgccattaaataggatttcccaacccccatatctccatataaataaagccccttgtgattatatgaaggataagtctctacaaaatcaagcagttgtgacatagctttcattcgactctcgttattaatatcaaagtcagtcattctgatattccgataggacttgggtagattaactaaattaatacgatcactgatagcttgttttttttgtgcttcaattaactctcgtgtttctaaataagaaacatctgcataaccttcattcataaccaaaataggctcatagcctttagcaatatattgactatccttatttttaaatttctgacgctcaatcaaaaattgattaaatttagacatgctgatatttatttcacgctgagaaagttggtgggttttaatgaactccgctacctgagcatctgctaaaatcatttgaataagctcatcatttgtattacgaggcactctcccttgattttctaatgcttgtcccactgatttcatgattcaccatcctttcctaatcgttctaaacgcttgagggcatctgttttaaactgttctaattcaatttctttttctgggctaacctcatctttataatcaggattactccattcaggaacattcgattgtttcttcttcgtttctgttttagtccttactttttgatctgaaaaatcacgaattttaagcacagcatcttcggccgtcataacattctgaaaagcaaaatcattagcaactttcatgatataggccttatttaagttagcagattttgtcttattcaaggtatataaaaccataacattaatgacttcgtctaggaaattcatttttgccaaatcctcaagtaaagtcttctcaccacttgttgtcactgccttacggcttctcttgattttttcaaggaacactagagcactatcatttttagattcccttagtatgaccttttcattatttgtaaaactctgattatctttaatatgctgcccctcattttgttgaactttcattcgctgaggcgcaatcattccattgatagctgtttgttttgctaattgataggtatcataccaatttaaatgataaagttctgatacactataaatacctaagacatcatctttttcattgttaaaacgtaagccatctcgcatcatcaaacgtttgaaactttccaagtcaaaaacatttttactccggtttacctcttgttttggttgtcctaaatccgagaaaacatctgtaaattttttagagatatctctagcatttttaggtattttcatatctaattctgccactgctacctctcctatacgtttttctaacaaacgacgatagatgggattagataaaaataactcatttgacatagcttgattcaacttaacaaggtaagtacctgtggcttggtaaacagtcaacaaatccaaagctgttaacattaccaatgcatcttgaaatcttggcatcccgtattgcagatgattgagaacctctgaaaatttatgacgtcgtattccgtcatcaaaaaaatgaacaaaataatcatagagtgccatggcatcacttcccataattgggaaatacaattgtattaaactattactatcataaacaatcttattttgcttaatatatgtaaactcatctattggactcatcacacgctaccactctttttactccgtacgcgctttgtaatttgttgaagtagttcttcaatttcatctacatctttaaaagatttataaacactagcaaagcgcacataagtaatctcatctaattcggcgagttcatccatcactaaatttccgatagtgatactagaaacctcatcttcatactcactcctaattttacgttcgatacgtaagatacaattttcaatatcttcgctcgaaacagggcgtttttgagcactctgaataataccattcaaaattttatctcgagaaaattgctcgcgagtaccatctttctttatgactaaaagaggcaattcttccaaacgttcaaatgttgtaaagcggttgccacatttttcgcactctctccggcgtctgatagtcgtaccttcttcagcttgtcggctatcaaccacactagatttattatagccacattttggacaacgcatgtcaacacccctattctatcatatcatttaatcatcttattttaacacaaattcagtaataacaaaagaagcgcctctcttatcacctcatcatatcaaaacacaaaataatccttatgccttttatcattaagcataaggatttttcttatatttctttagtttcttcaaatttttttataggaatgcgaacaatgaattcagtcccttgatttagttcacttttaatatccacctttaaatggtaagcatccataatttgtttaaacactgaaagcccgatacctaaaccagcttgtgtactttctctgttacgtgatttatcagttcgataaaaacgatcaaagataaactcaatatcttcatctgagataccttctcctttatcttttacaactactgtcgcaaaatcattgtctactgataaaacaacactgacttctttataactaggagagtacttgatagcgttatcaattaagatcatgagagcttgctcaaaatgtatcttatatatctttccccaaacgatatctgaaatattattttcaaaaataaattgaaaatcttctctcaaaatacggaaattttcaataacaactgatatagagcttgataaatctgtcacttcatcttgatgaagttccaagcttccttggacgcgaatcatatttaacatgtcattaatcattaaggacatacgatctgcctcatggtatgccgctgctaaactttcttcaagaatttctggatcatctttcccccaacgttgtaataaaccaatatgaccctttacaacagcgacaggcgttcttaattcatgactaacatcactaatgaattgtgattgtcgacgagtatagtcttccaactgatccaacatcccatcaaaaatcctagacaattctccaatttcgtcttctgaacggaccttacttctaatttctaaattactaggattttcagatatctgatgcattaagtcgtgtaaatttttaaccggacgaacaatacgcttagtagcactattaataacgaccaaggctaaaacagtccctaaaacttccatcataatcaagaaaacaatgatgttttgcctcatactataataacgacctaaattatagaaaatttgaacgtatccaagcaactgtcctgttttttgagagtagattgcttttgtaccaacaaaaccttccatatctgcaactttagagatgataacttttcccatggatttaccaatagttggcatacccgttctcagtgtagaaaaaactggtttcctgttgacatcgtatagggtcatttcttgattaacataaagaatactatcgattgactcgcccgttctaacaattccattttgacgcttatgaggatagatgtcatccgcaaaaacctggttgtacaggatctctaaaatatcatcggatgtcaaactagagttcgcttgcgacaaacgaactctagttttttctaatgacctaccgacattaattttttccctgtgaaggacgtatcttgttgccgaagtataaactaaaacagaaaatactgtaaataggctaaaaaataagataaaaactaattgcgataatttttttgacagaggttgttttacccctataaactgatcttttttatttttcacgaatcacatagcccattccgcgaacagtttgaatatatgattcacgacctgggatatcaattttacctcttaggtaacggatataaacatcaacaacgtttgtctctgctgccacatcgtatttccaaacatgttctagcaactcttctcgtgtcataacacgattcatatttgtcatcaagacattcaacaaatcaaattcacgttttgttagtgaaatttcctcatcaccacgcatcgctgaacgattatgagtatttaatgacaaatcacggaaactaccactatcacctttttcttttgtcttcgtttcaatttcttggcgtcggaaaatcgctctaacacgtgctaataattcttcgattgcaaacggcttaacaatataatcatctgctccacgatcaagaccagctacaatatccataacagaatcacgtgctgtcatcatcatgatataggttgttttttcagcctgcaggcgacgtgtgatttcgaaaccatccatctctggaagcattaaatccagtagaatcaaatcaaaatctttttctaatgctgtgtccaatccttcacgaccgtttgtttcaacaacaacatcatatccttcatgtagtagttctaacgagacgaagcgagctaaatttttctcatcttcgattattaagatctttttacccatctacaccaaccttcttattctttacttaacactatcaattattttttagaatatctagataaaaaacaagatagcccacattttactaacgtttctttaaataaataaatcgccatcccaaacaattgttcgatagcgagacttaatttttattattgagtagtgtcctctgtcacttttcaattctactaaaaaaaaattaaaatatcaactgatgttattaataatttttatctaatcactatcaaacataccttctaaggctgcgaaaggattagatttttctttttctttagcttgtttttcttcatactgcttttcagtcattaacgaccaatttttacctgataaatccgcttctaccccaacctcatcagctgccagaacacgaagaggtatatttaacaagatattatcgataacgctttcttctaaattaatatcatcttcctctaatattaagaccaactcctgatcaacgagctcttttttagtgctaacattttcagcttcaataaaaacttcattaatagtttgcttttcagataaaacaactggtttcatagaacgactagacggtaatgtaatatcgtaagccatattatagtcaagtagatagagaccatcttcatacaccacatgacctgaaacttgaatatcagaaatatccattatctctgaatgacgctccataagcgactctttgatatctatttttttatcaaaataaagcccctctggtgattttttgatttctgtaagtaacacgtgccatctccctttatagtatatgtcatattatatcaagttttacaggctttgtcttaaaaaaacaaaacgcaaggcatagctaccctacgttttgttaacgactacatatgacgcaaacgctcaatacgatctgcaattggtggatgcgtataaaataaagactttaacccttcttttttcgttgggtcattgatatagagagccgcactagcatcatctactggatgccccataggttcagaacgatcaagtttttctaaagcagagatcattccttgtggatttcttgttaactcaacagaactagcgtctgctaagtattcgcgctgtcttgaaatagctaattgaactaaactagcggctaatggtgcaaggattagtgataaaatagagaaaatcaaaaccaagatgtttccaccatcttctctgtcatcatcacgcctacgacctccgccgtaaaataacatacggctaccaatgcttgatattagagttacagcactcgctaaagctactgcaatggttgaaatacggatatcataattacgaatatgactaacctcatgtccaataacaccctctaactcttcgcggttcataacagctaataggcctgtcgttgctgcaacagcagcattttctggcttagagcctgtggcaaaggcatttagggagtcatcttcaacaatgaaaacgcgtggcataggtatctgagctatcattgccatatcttcaacaatatgaaaataatttggcgcctcatcttctgtaacttcacgcgcattgttcattgacataacaacattagttgattgaaaaatcatacttactgcatagataaccccaataattagagctagaacaagcccaaattggtagctgcctaataccaaataacctacagctgctccaatagctgctaaaagacagaagaagacaattaacaagacaactgtttttctcttattacttgcaatttgttgatacagcaaaagcctctctcccttctcaattaaaagtcaaaggaaacttttggcacttctttttcttcttcaggagtttctaagaattggcttggtttgaacccaaatagttttccaacaatattacttgggaaagtttctaatttcacattataattggatgttgttgtgttatataactgacgtgaataagaaattttattttccgtattagttagttcttcttgaagtttaacaaagctattgttggcttttaaatctgggtaattttcagcaaccgctaaaatacttgaaagctgtcttgttagctcattacttgctgtcattgcttcagcaggtgtgttagctttagcaacttgagcacgcagttctgcaatcttctcaagtgttttcccttcgtacgcagcatagcctttaacagtttcgattaggtttggaattaaatcgttacgacgtttcaattgaacgtctatttgactccatgattctttagtatgcatgcgacttctaactaaactgttataagcaacaatcaaccaaataacaaacaaagcaataattgctattaaaatcatagttcccatagtagtagctcctttacattttttccattatagcaattttctttagattaggaaagtcctgttattcccattattagtatttgtgataaaatagagtcattatacgatatagaaattgaggtttactatgacaccccaagcattttatcaagttctgatagagcatggtattacacttactgacaaacagaaaaaacaatttgaaacttattttagacttcttgttgaatggaatgagaaaattaacctaacagctattacagataaggaagaggtttacttaaagcacttctatgattctattgcgccgattttacaaggttatattgacaatagtcctcttagcattttagatattggtgctggtgcaggttttcctagtattcctatgaaaatcctttatcctgaaattgatattactattattgattcactgaataaacgcattaattttctaaacatattagctaatgaacttgaactttcaggagttcacttcttccatgggcgcgctgaggactttggtcaagatagagtatttcgagctaaatttgatatcgtaacagctcgtgcagtagctaaaatgcaggttctagcagaattgacaataccttttcttaaagttaatggtcgcttgattgcactgaaagctgcagctgctgaagaggaattaatttctgcagaaaaagctttgaaaacactattttcacaagtaactgtaaataaaaattataagttacctaatggtgatgaccgaaatatcacaatcgttagcaagaaaaaagaaacgcctaataaataccctcgtaaagctggtactccaaacaagaagcctttgtaaagttgggagctagtatgaaacatttctttgattacaagacaatgtctgtcgcacgtaaactcagcattagttttatcgctgttatcctattgggaagtattttactttcacttccaatttttcaatatgctaacgcccctaaaacacattacattgatcaccttttcacgactgtttcaatggtatgtgtaactggtttatctgtttttcctatcagtaaggtttataacggttgggggcagattgtagctattttactcatgcaaacagggggacttggtttagtaacactaatgtcgttgtcttactataccctaagacgtaaaatgtcgttaaatgatcagacccttttgcagtcagcgataacttataacagttcgacagatttaaaaaaatatctctatatgatttttaaagtaactttaactttagaagttttagcagccagcattttagccatagattttattcctcgatttggtttgggtcatggtatctttaatagtatattcttagctgtctcagccttttgtaatgccggttttgataatctagaggcaacgagcttagctcaatttaaactaaatcctttggttaacattatcgtttgtttcttgattatttcaggaggacttggatttgccgtatggaaagatttaattgaagctactatacaaacatctcacaagggaccaaaattaatcaagacatttccaaaacgcctcagcaaccattctaaactggttttaaaaacaacaaccattattttactaacaggaactttgctttcttggttgttagagtttggaaattttagaacaattgctaatttatctctacctaaacaactaatggtcagctttttccaaacagttacgatgcgtaccgctggattttcaactattgattatacccaaactgatttcgcaaccaaccttgtttatattatccaaatgttaattggaggagctcctggtggaacggcaggaggatttaaagtcactgttatcgccattttactcttactatttaaagccgaactgagtggccaaagccaagtgacttttcattatcgaacaattccttccagtattattaaacaaacactatcgattttaactttcttttttatcatacttattagcggctatctccttcttctggaactcaatccccatatagatcctttttctcttttctttgaggcatctagtgccttagcaaccgtgggtgtaacaatgaacactaccaatcaattaactctgggcggtcgaattgtaattatgttcctcatgtttattggtcgagtcggtccaattaccgtactgctatcaattcttcagaaaaaagagaaggaaattcactatgctgaaacagaaattattctaggttagaaaaggtcttttatgaaaacaaaaattattggtgtacttggtctaggaatatttggacaaacactcgcacaagaactaagtaactttgaacaagatgttattgctattgacagcaatcctgaaaatgtacaagctgtcgccgaagttgttacaaaagcagctatcggagacattactgatttagctttcctaaaacacatcgggatcagtgactgtgatactgttattattgctacaggaaacagtttagagagctcagtattggccgtaatgcactgtaaaaagttaggcgtcccacaagttattgctaaagctcgaaaccttgtatacgaagaagtactttatgaaattggtgctgatttggttatctctccggagcgagaatctgggcaaaatgttgctgcaaacctcatgagaaataaaattacagatgtcttccagattgaatctgatatttctgtcattgaatttaaaattcccaaatcatgggtagggaaaactgtcgaacaattaaatatccgtcacaagtttgatcttaacctcataggtatcagaaaagcaaaaaacaaacctgtcgataccgaagttccaatcaatagtccacttgaagaaggtattattctagtggctatcgctaactcagatgccttccaacgctatgactatttaggatactttaactaaagaaaataaaaaactgactattaaggtcagttttttattgccatgggttatagaaacgtccatgattaaggtgaattaaataaaggcttacaaacagactagctagagcaagtatgattaagacaatgtcacttttttccaaagattgcttagagtaccaagtacgtcttttatttttaccaaatcgtcgaagttccatagcagttgctactgtatcaatacgttctagagagctaaaaattaatggtgtgacaatctgcaaattccccttaatgcgtgctactaagttcgatttttttgataattctattcctcttgcctcttgtgctcgacgtattgtataaaattcttcttgaacatcaggtatatatctaagggtcaaactaacagcataagctattttatatgataaacctaattgatttaaacttgatgcgaactgactaggattagttgtcatcaaaaacaaaagagctaaaggcactgtacaaaagtattttaaaatcagattaaagaggtaaaacaactcttggctagtcacatcatatgggccaattccttttaacaataaagaagaactaccataaatcttatcaccataatggggagcaaaaagatagaccattataatatttaaaacagcgaatacaacaactaaagtcataacaaaggacacctgttgccatttgatttttgctaatctaaataagactagcgatcccaatgaaacaacaattaaaaatcttgtatcataagtggtcatgcaagcaacagaaactaaaataaaaaatagtaacttactggcacctgatagcctgtatagaaagccataaccctcttgataaccaattaattgtttagccattcttacctccttgattatcaatgtaccattgtgttagtttctgtggagatatccctaatctgtctgctaaagcaaataaactcgttttctttaaatgagtctttttcaaaagctctgtatttgaaaggatgttaataggatgatcatctgcaacaatcagaccattgtcgattacaattgcacgatctgtatactctaacataagctgcatatcatgtgtaatcataacaatggtatgtccatcacaacttagtttatcaaggaaagacatcatttcagtataatgcttcatatcttgaccagctgttggttcatccaaaataataacttctggatttaaaatcagtatcgaagcaatcgtaacacgttttttctgaccgaatgatagagccgatataggccaattcctaaattggtagagcccacaaacctttaatatatcgtagacacgactttctatatcattatcactaaaacctcttaaacggagacccagagcaacttcatcaaaaaccatcgcttgacttatcatctgattgggattttgcaaaacatagccaattcgttctgctctttcttttatagagtcttgactgacatcttcattattataaattagagtagcattattagggataaattgacataacgctttagctaaagtagatttacctgcaccatttttcccaacgatagctaaccgctgacctttatataaatcaaacgaaacatcatctaaagtattattctctaaatcatatgacaccgacaaatgctgtactgataataatttatctgtatgtttatctaaatctaatgctcgcattttaggtatcaatagttcactgaaatcaaagtcatcaatagacgtcattgtattttgtttttcaaagtcatatcctaaatttttgagagcagaaatatacagtggttctcgaataccatattcagataaaaaattagtttttaaaagttgatccggctccccattataaataatttgtccatcactaaaaagaactacacgatctactcgctcataaaaaacatcttccaatcgatgttcaataataatagtggtcgcatcttgctcttgatgaatacggtcaaccaatgccatgatatcttgtcccgattgtggatctagattagccaaaggctcatcaaataatagaattgggctatcgtctactaaaactccagctaaactaacccgttgtttttgtcctcccgacaagtcttgtggacgtttagacaaaagaggagctatttctaaacgttttgcccacatttcaacgatagaggccatttcttcctgtgctacaacatcattttctaatgcaaaagcaatatcttctgctactgtcaatcctataaattggccatctggatcttgtaaaaccgtagaaactaaatgagacttgtcatatattgacaagtcaaaagcatttttatggttaatcgtaaaaataccactatattggcctttatgagtatttgggataataccatttaaacaatgaccaagcgttgacttccccgaccctgaaggtcctaatatcaagaccttttcacctttaggaatgcttaagttaatcccttttaaagttggttcagattgaacgtcatattgaaaggtaaaatccttccattcaataaaatctttcatagattactctcttatcctaatctttggataaactacctttttgtggtcgtgatttagcgtatgctagcaacaaaagcgtaccacctactccaatagtaatggaattcacaaggcttgataagaaaccttgtgcaaaaactttgcttgcaggttcgctataaaagaaaatatcaccatacggtgcaacgacagaccaacctataaggttagcaataacttgaactacattaaatagaagcaaatccttcttagtcatgccagataattgaatagctaattttttagcaaaaaagcctatcatcaaacctaaaagaccactaactaaaacccaagtccaccacggagaaccatattgaatcgaatctttcaatgcgtgtccgataaaaccagtaaaaaaaccaactcctggtccataaataactgcaaataatgctaaaactgcatactgcaattgaatattagtatttggaattggtgttggtatattaactagcatacctataatgataaaaagtgcagctccaattccagtcgctacaaccttttttattgtgtttgtattcataaaaacctctctgaaaaacaagcttaaacagtcacttacaatctgttctattttatcatatttcaagctgatttgaaaccttattgacaagaagaactgaaaaacgattgaaaataatattaaataccaaaaaagatctcagatagaatacctaagaccttcattagtttatttttttccaaaaactgatttttcagctacagccgtgaacagaacgtctgtcgatgaatttaaggctgtctcacacgaatcctgtatcacccctacaatgaaaccaactcctacgacttgcattgcaacgtcatttgaaataccaaataagctacatgccaccggaatcaataaaagtgaaccaccagttacaccagaagctccacatgctgatacagcagcaaccacacttaataagaatgctgttggaaaatcaacagtaattcctaaagtatttactgctgctaaagtcaggatattaattgtaatagctgcaccagccatattgatagctgcaccaagcgggatagatactgagtaagtgtctttatctaatcctaaatcctcacatagtctcatattaacaggaatattcgccgcagaactacgtgtaaagaaagctgtaatacctgaatcctttaagcatcgtaataccaaagggtaaggatttttacgcatcataacaaaagcaatgattgggttaacgacaagagctacaaataacatcgtacccaccaaaactaatattaaaagaccataatcacctagtataccaataccgttttctgaaatgctagtgaaaaccaaccccataataccaattggggccaaattgataatccatttgacaacttgtgaagtagcatcagcaaaagtttgcattaaatcttttgtacgctgattactgcttcgcatcgccaaaccaaaaataaccgcccaaaatagaatactcatataattggcctcggtaatggcatgaatgggattatcaacaattttcaacaaaagagattgaaagacttctgaaatccccttgggaggtaataagtctgtctttgctggcgttttcaatatcagtgtcaaagggaaaatatagttcacaacaacagcgattagggccgctgcaaaagttgcagtgatatacaaaccaattatcgttgacatattggtcttaccgccctcacggtgttgcgacaaggcactaataactaaagtgaaaactaaaagaggggcaatagctttcaaccctcctacaaaaagttgaccaagtaaaccaatcgcagaggctttagggactaaaatacccaagaataagccaataacgactccaattgttattttttttatcaagcttgtttttctccaagcttttaaaaatcgtttcatactaaactcctaaaaaattcttaaactctatgatatgataaaaaaaaagattcgtcaaataccttttttattttttagaggttgacgaattctaaatttttctgatataattactttttgaaatattcaatcaatttcgaaaataaaatatttttttgtacagaaaggtacattgatgaaactaaaaaacacttatatcattatcggcttgatgctttttgcgctgttctttggagccggtaatcttatttatccagcctacttaggtatctactctggttctaattgggcgtgggctatcattgggttctgcttaacaggcgtaactttacccctacttggtgttgcagctgtggcgtactcaggagcaaccgatgttgaaagcttcaccaaacctgtctctaaaacatatgctattttctttgcagtagcactatacctatctattggacctttctttgccattcctcgaacaggggcaacctcattctcagttggtattcaacctatcttaggcgacagctccttagtcaaaattatctatggtttaattttctttggtatttcttatttcttagctattagacctagtcagattgtagatcgtattggtaaatatctaactccctttttactaactgttattagtattttaattattgcctcactcatccatccagctgctatcgttggaacaccacataacgcttcaacgaatgtcagcgatgctttcaaggatttaccattcctagcaggactgattcaggggtatggtacaatggatgcccttgcatcaattgcttttgctattatcgttattcaagcaagtaaacagtacggagcaattaccaaaaaagaaattacttctatggcacttaaatctggtgctatcgctacatttcttttagcttttatttatatttttgtaggacgtattggtgcaacttcacaaagcttgtttaaatttgcaaatggttccttcttacttcacaatactccaatagacggtgggcatgttcttagtcaatcagctaacttctatttaggaattgtgggacaagctattttaggtacggctatttttcttgcttgcttaacaacagctactggattaatcactgcttgtgcggaatacttccacaaattacttccaaagattagtcacattacttgggctacaatctttactttaattgctattacgttctattttggtggtttatcagagattatccgttggtcactaccagttctctaccttctctatccattaactatagtcttaattttcttagtcttttttgatcaaaaatttgaaagtagccgcattgtctaccaaacttctattgccgccactgctgtcgctgctttatacgatgccttatcaaaactcggcgaaatgactggtttatttaccattccatccgctttgaccacattctttactaaagttgttcctttaggtgaatattctatgggatggattagttttgcaatttgtggtgtcttagttggtcttattctaaaaaaagtaaaagcataataatttaaagcagtacgaaaattactgcttttattttaaaataattattgtaaccgctttcttttggtggtataatagccttgaaaataaataatttttggaggaactctaatatgagagctgcaacttatctttcagctaatgaattatcacttactgataaggctaaacctcaagtaataaaacccacagatgcggttgtaagacttgtcaaaacaaccatttgtggtactgatctacatatccttggtggcgatgttcctgcttgtaaaccaggaacaactttaggtcatgaaggcattggtatcgtcgaagaagttggttctgctgtcaatcattttaaagtcggagataaagtaattatttcttgtgtcactgcctgtaatacttgctattactgtaagcaccagttgccttcacattgtgaagatggcgggtggattttaggacatcttattgaaggtactcaagcagaatatgttcatattccacatgcagatggtagcctttatcatgcacctgaaggtgtttgtgacgatgcattggttatgttatctgatattttaccaacttcatacgaaatcggcgtcttaccttctcacattaaaccaggtgatactgtttgtattgtaggcgctggaccaattggactatctgccttactaactgcacaattctattctcctgccaaaattattatggttgatttatctcaaaaacgacttgaagcctctaaaaaatttggtgcaacacacaccattctatcaacgtctactcaagaagttaaagaagaaattgataaaattaccaaaggccgtggcgttgatgtcgtattagaatgtgttggttatcctgcaacatttgatatttgtcaaaatgtagtttctattggaggacatatcgcaaatgttggtgttcatggtaaacctgttgaatttaacctccaagatttatggataaaaaatataacccttaatactggattagttaatgctaatacaactgaaatgctccttgaagttcttgagacaggcaaaatcgatgcaacacaactagtaacacatcacttcaagctatctgaaatcgaagaagcttataaggtatttaaagctgctgaagaaaacaatactctcaaagttatcatcgaaaacgatattactccagcctgataatttttaaacaaataaaaatgtgagaagaatagccttctcacatttttatttatgactcaagcgacgtgttaaaaaatcacctaaaaattggataaagaaaattaataataaaatcagaatagtcgctactaaagtaatatcatcacgagaatagttatatcctttagtaatagcaacagaacccaatcctcctgcaccaatagcgccagccatagctgtttcacctactaaagaaatcaaagtaaccgttgatactcgaattaaatctggtagaccttcacgaagataaactacaataatatcccaaagtgttccacctgaggcttgtgcagcctcaataactccaccatcaagttcagctaaaacaacttgaacttgacgagcaaaaaatgggaaaactgccaaagaaagaggtaccaaagctgctggtgaaccaagtgttgttcctacaattacgcgagttactggcgcaatcaaagcaagaagaataatgaagggcagagctctaaaaacagaaacaactttatctaaaactccaaatactaatttattagcaataactcctctaggactagttaaaacaaggaataaacctcctaacaatcccattaaacctccaataaggaacgaccaaaaagtcatataaagggtttgtacaatagctgtctgccagccgtaagcaccttcccaacccatttgatatacatttggtaaatgtgtttgaatccactctatcatgctttaccaccttctttcaataacgttaattgaacttgcgaatctgtaattgcttggcaggcttgtcttaatttttcttcgtcacctgataagataactaccatttctccaactggaataccatctaaaatttcaatattcccatagaggatgttagcagttacttcaaattctttataaatttgatttaaaagcggctcatccgtgctatgcccagcgtatttcagttgaactaatttgctacctactggtagatttttgacaacttcttgttgctcaatcttaagcattgcctcatcaataccagtagctatttttataaaatcttgtgtaagactctctctaggatgtgaaaaaatgtctaaaactgatccttcttcaatcaatttaccattttgcataacagcaacgcgattagcaatgtctttgacaatttgcatctcatgtgtaatcaaaacaatcgtaagtcccaattttttattcagatcttggagaagggcaagtatttgttttgttgttttagggtcaagtgcagaggtagactcatctgaaattaagattttaggatcgttagccaatgcacgcgcaatggcaacacgctgtttttgccctcctgataattgtgaaggatagttttgagcacgatcggataatccaacaagttctaataatttagcaaccttagctgctttcgcctcttttgataaacctgaatgtttaagagcaaaagctacattctgctctgctgtcaactgtgacattaggttaaaatgttgaaaaatcattccaatttcacggcgctgttcgcgtaattgtgtgctagtcagtgtcaccttgttgtcgtaaataacttggtcatcaatagtaattttacctgctgaaggttcttgtagcaaattaataacacgaacaagggtagattttccggctcctgaataaccgacaattccatatatatcaccttgattaatatggatagtaacatctttaacagcattaatctcacgtttcttttggtggaaagtaacatcaatgttgtctaatttaataattggttctttactcatatgattctattaaagcctccactaattcaatatgggtgtaataatcagcaatactaacattttcatcaacgccatggtctcgactattggcatgtcctatgccaatagctgcaattggcgctcttagagcttgatgaactaaatacattggtcctgtacctggtgaggtaggtaacagagatatcccttctggataaaattgctcagctaaatcaacaacctttaggatagatggcgctgacatatcactacgataagacatttcaccaagggtataggttagctcaatgtctttaaagccattctctttcaaatgattttgtattgaatctagtacacctttcggggttaaccctggtactaacctaacctctgctttacatttagcataagcaggtaaaattgttttgacgccttcaccttgataacctgaggttataccttcaatggctatagaaggttcaaaataaagctttctcaaaaaagttttatgactatctgctaaactgggcaaaactaattggtaagcaccttctagcgcctttgcagatctataagaatatttttcaactaattctaactctctcttagtagggggaataactttatcataaataccttctaccaatatatgacctttgttatcccttaacgtattgagggcttgaattaaataccatgtcgaggaatcaacaaccccaccaaaggatgaatgaatatcaacatccgctgaacttactgataaatcaaaagtgacaatgcctttatttccaccagcaatttccaactgtcctttaggatttttagggccatcttcccacacgatcaaatcagccccttgtagctgctcttgatacttttctaaataataatcaaggcctactgaagctgattcctctgctccttccacaataaaagtgatatctagaggaagttcccctttgtgtcttgataaatattttttaactgctgataaacgtgcggtaatgtgacctttatcatcatctacaccacgtccatacatcttaccatatcgaagtgaaagtgtaaaagggtcctcagtccactgttctacctcatctgctggtacagtatcataatgattgtaaaaaataatacgcttagcatctacttttgatgatttgaaatttgccacgataaagggagcgctatagctgtcatctataatgacttctgcgccagcttttatgaaaacttctccaagatagcttgataagtcatttaaaccaactttctgagcaaaaattgacttaattgcaattaaatctcttaaaatattgatatcatcctgaacaatagtatcagatagaaacttttgaatttgattttcttcgtttgttaaagtcatctttcatccaccttccttcaaaaacaatccaagagcctggcacattgtattcgtcccaggccctttatggctatatggctgataagttgtatcctattaggattccctgttaaacttatacagtcaattcacgttaccattgtggaatatcagctgaagtatctttgataacttttttcacttcatctgtgtgataagcatccaagatagcttggatagctttagcgttcttttgctttttccaatttttacgtcccgcaatgatattaatccattgttttgaatttttatctgatttctcaacaaagatagcatctgaaggttttaaattagcttgctcaatgtatgtattattaataatagctgcatctacatctttgagtgcacgtggtgtttgactcgcatctaactcctgaatattaatatcctttttattagatgtgatattagcaactgttgcaaccttcttaccagaaacattcaatttgattaaacctgctgactgaaggacatacaatgcacggctaccatttgttgcatcatttggaattgcaatagtggctccttttttcaattttttaagagattttaccttctcagaatagatacgaattggagctaagtaagtcttttcaagtggaattaagtttttcttattttccttattccagttttctaagaaattgtaatgttgaaaggcattaatatccacatccttattggctgtcgcttgatttggttgtgtataatctgtaaattctgtaaatttgattttagctttatcacctactagcttttcaattttatcccaacgtgctttttcagtgtcagaaaaggtcataacaccaactttaacaactttacttgaagttgagcttgctgaaacttcttgattactaaatgtgactcctaaaagtgttgttaaggctaatcctaagacaatatgttttaacttcataataaattccctcaatttttgtgataaagatattatcccataggaagttattagaatcaaattgttataaactgtctcttgttatagttttaaactatataacaaaaaactaaggattgacatctccttagtttttattactacttctccttaggagtaacgagatctttctcatttggtacgtaatcacctccaaggtattctttagctatttttgaaagtgtcccatctttacgtaattgtttaaggcgattattcacatacttttgcaagtctttttgatcctgaccaaagatgaaataaatataaggctgatctctcatagtcaaagggatggtttttaaattcgtgagaccttgattctttatgatagcgttaacagttggtccgtcaaaaagtttaaaatcagcttttccatcactcaaattcgttagaatctgtgtaatattttcattagtatattttagagtaacaggatttttctgatgctctttattgaaattttctaattgcttggcagttgtcgttccttggacaacctgtgttttatgaccactaatatcattataagctttgatattactattcttaggaactgctaaaactgaaggagtagagcctattgggtatgaaaataaatatttttgagatctctctgatgaataagaaatattatttccacccatttgaaactttcctgaatcaatgccggtaaataccgatgaccattctgtttttttaaaagtgactttatagttatctgaacctttaaaaacagctttggctacttcaatatcaaagccagtcagtttcccatccttcacataagaaaaaggtgccgttgttccaacagttgcaaaattaacttcttttttgcccgtcttagtagtatgagattttgagctacaagcagctagagacgctactgtcactaaaataattcctgttacacttaacactttttttattgtcatcttttttctcctctttaattgtacacgacatcataacatctttaagtttttaactaacacttatcttctatcgtctgagagtttttgctattatatggatgctacgtttcattaacaaaataaccaaataaggtttggttttcaatttggtgaagcattaattctggatgccattgaacacctataatacattgttctgttcgactttcataagcttctactgtcccatctctaggatctctagcactaactatcagaccttcagctaacagtttaacactttgtctatgaagagaattgatcttaaaatcacctgatataaagccttctagaaaactccctttttccacatttaaataatgagcaaatccaatgtaaggctcttgatagtgattatcaatagattgattaagtgtaccaccaagcgccacatttactaactgcatgccacggcaaatcgcaaagattggtttattttgtttcaacgcttcttcgactaatgcaaattcaaaaatatcacgcgcaagtgaataatcatcactctcaattatcttctcttcaccataataggatggtaaaacattttggccaccagatatgatcagcttatctatcatctcaacataagctttggcactttctgcttcacttattggtaggataactggtaacccgcctgcgtttttaactccttccgaaatatgcctagataccgaatcataataataacctggaatatctgacatttctctttcatttcctgtaataccaataataggctttgttaacattttgctccctcatcaaccaacaactgtctaataattatcattttacacctaaaaaaactttttgaataatattttttacctatcacttctttaacaatacctatcaactctcacaaaaataaaaaccatagtattaatactacggttttattttttagaaatctgctacattatgataaactttttgaacatcatcatctgattcgagtgcgtcaataagcttttcaaaagtttcaaggtcatcaccttccaatactacttctgattgaggaatcatttcaagttcagtaacttggaattcttctacaccattatcgcgaagtgcttggatacctttatgaagatctgttggggcggtataaactgttattgttccctcttctgcttcaacatcatctacgtctacatccgcttcaagtaattgttcgaagacagtgtcagcatcatcaccagcaaaaacgatgacaccttttttatcaaataagtaggataccgatcctgaagctcccatattgccaccgttcttaccgtaagcagtacgtacatttgctgccgtacggttaacatttgatgtcaaagtatccacaataatcattgaaccatttggaccaaaaccttcatagcgtccctctacgaaagtttcatctgtgtttcctttggctttatcaatcgctttatcaataacatgctttggaacttgtgcttgcttagcacggtccaaaacgaattttagagctgagtttgactcggggtctggttcaccttgctttgcagcaacatatatttcaacaccgaatttagcgtatacttttgagttagcaccatctttagcagtctttttggcaacaatattggcccacttacgtcccattggaaaatctcctttgatttcatttttaataacctgctggctcatattggcaagcaatcttaattttaactctattattatagcactttgatagcaattggtaaaatggaaattctatcaccaagctctagcatctgtcttatgttttaagtaatcaatccatctactatcctttacacgacacaaggtaactgataaaccagccatatctaaacttgtaattaggtggcctgttttaataaaaggtaattgtaaatcgtctaaagccagaaattccatgacagcatttgtaaaaagtaattcctccattttagaacttcctccaagattatttatcaatagaatgaatgcttctccatcttgccaacgtaatttcattttcaatttgttaactagttcgtttgccaaatgttccatggacacgaaaggcattgtccggtatcctggctcaccatgaataccgattccaaatgagatgtaaccttcttctatatcaaaaacaggttgatgctgacctaaaatagtggctgacttacttgctacacctaaagtagccattgaagttgtcaaagatagtcctagctgttctaattcatctaagcttgctccttctaaagcagcttgtccaataattttatgtagcaacacagtaccagcaacgcctcgatgacgaattttaaaatttgatgtttcaacagagatgtcatcatgagaaacgatgtatttgattggaatgccttcttgacgagcctgttcaatcgcttgggaaaattcttccaaatcagcttcaaaatttttgataataacaaagacacctttgcctcgattgataaatctaatagtctctagaatatcactagcacatggtggtacaaaaataggaccactaatcgctgccgatagcattccctcaccaacatatccaaagtgagccggctcatgtccgctgcctcctcctgataaaatcggaattacttgctcggattgccctaaataatgaatagcgggcaaatcttttatttgctctactttaggattagttttagtgattgcttttattgtttcaaaaacatattccattttatgatgttctgtttttctcatatccttgtcctaataattttctattgatgttctgataattttttcaatgactttcctattaaataattcttcttttgagttatttattaactcatattttataaaataagagagggctttactatgataattaataaatgtaactctttctttctgattaaagttagatttactataatcagaaagaagcttatctactaactgctcacagtaagactcaaaatacgaagaaaaatcattttgatcttcaatttgaaataatttaatatagaattcttgattcattttaaaaaaagtcaacaactctgataacaactgaaaacctgagatatagtctaaattatccgtaacttgttcgcttaattctgtttggaaaatccattctaataaagcatatttatcaacaaagtgattataaaatgtttgacgtctaatacctgcatcttccataatatcactcaccgatattttgtcaaaagcttgcgaaataaataaacgtttaaatgacttggctatttttttcttagtaataagcgaagaagtcataatttctcctttattttatattgaattgctgatgatttattatggtttagtgtaacatgatttatgattattgaaaaccctaacaaagcggacaaacaagaaaatctgtccattccagaaaaggcttacaaattttataataaaagagaattaaacataaaaggagtttccaaatgaaaaaaattctcaatcaaccaactgatgttgttactgaaatgctagatggattagcatatgttcataatgatttagtacatcgcatagaaggttttgatatcattgctcgcaatgaagagaagtcaggaaaagtggctctcatttctggcggaggaagtggacatgagccttcacatgctggtttcgtaggcgaaggaatgttatctgcagctgtgtgtggtgcagtatttacttctccaactcctgaccaagttcttgaagcaattaaagaagctgatgagggggctggagttttcatggttatcaaaaattattcaggggatatcatgaactttgaaatggcacaagatatggctgaaatggaaggcatagaagttgcaagtgtggtcgttgatgatgatattgcagtcgaagacagtctttacacacaaggaaaacgtggtgtagctggtacgatactcgtccataaaattctaggacatgctgctcgtcatggcaaatcacttcaggaaatcaaagctattgctgatgaattagtaccaaacattcacactgttggacttgcactaagcggggctactgttcctgaagtaggcaagccaggatttgttcttgcagaagatgaaattgaatttggtatcggtattcatggtgaaccaggttatcgtaaagaaaaaatgcaaccttcaaaggctttagcgacagaattagttgataagttaattgaatcgttcgatgctaaatctggcgaaaaatatggtgtccttattaacggtatgggtgcaaccccacttatggaacaatatgtctttgctaacgatgttgccaaactccttgaggataaaggcattgaagtgaattacaaaaaacttggtaactatatgacttcaattgatatggctggtttatcactaaccttgattaaactggaaaatcaagagtggttagaagcacttaatagtgacgttacaaccattgcttggtaatcattcctgttaattagaacaaaaggaaggaactcttatggaagtaaaaactgcaatagaatggatgcacacttttaaccaaaaaattcaatccaacaaggactatttatccgaactagatactccaataggtgatggcgaccatggtggcaatatggcgcgtggtatgactgctgttattgaaaaccttgataacaatgaatttagtagtgctgccgatgttttcaaaaccgtgtccatgcaacttttaagcaaagtaggcggagcatctggaccactctatggttctgcatttatgggaattacaaaagctgaacagagtaaaagtaccatttcagaggcacttggcgcaggacttgaaatgattcaaaaacgtggtaaagctgaacttaatgaaaaaacaatggttgatgtttggcacggtgttattgaagcgattgaaaaaaatgaattgactgaagaccgtatcgattccttagtagatgctacaaaagggatgaaagcaacaaaaggacgcgcttcttatgttggagaacgctcagtaggacacattgatccaggatcattttcttcaggattattatttaaagcattactagaagttggaggtgtctaatgtctgatattggtattattgttgtttctcactctaaaaatattgctcaaggagttgttgatcttatttcagaggtagcaaaggatgtctcaataacttacgtgggtggaacagaagatggtgagattggtacttcttttgatcaagttcaacagattgtagagcaaaatgataaaaagacgttattagctttctttgatttaggttcagcaaaaatgaatttagagttagtagctgatttttcagaaaaaaatattatcattaactctgtcccagtagtggagggagcttacaccgctgctgctcttctacaggcaggtgctgacctggatagtattcaatcacaattagctgaattaactatcaataaataaggagatattatgactcaatttcttggggaatttttaggaacatttattttggttcttcttggggatggcgtagttgcaggaaatgtgctcagtaaaaccaaagaagaaggaactggatggactgctattgtttttggctggggaattgcttgtaccgttgctgtttatgtttctggattattcagtcccgctcatctaaatccagcagtcacattagcaatggcttctattggagcaatttcttggggacaagttatcccctttatcattgcacagatgttaggagcaatggttgcggcaactattttatggttacactattatcctcattggaaagaaacaaaagatagtggacttatccttgccagcttctcaaccggacctgctatccgccatacaccatcgaatctccttggtgaaattatcggtactgctattcttgtgattacaattatggcaattggtcctagtaaagttgcagcaggtcttggtccaattatcgttggtatagttattttcgcagtaggattctctcttgatccaacaactggttatgctattaaccctgcacgtgacctagggcctcgtcttatgcatgctatcttacctattgaaaataagggtaactcagattggtcatacgcttggattccagttgtaggtccaattatcggcggtgtccttggggctatcttatacaatattgctttgactttagtttaactaaaaaaccagaaagttaatactttctggtttttcatagttgcagtatgctttcaaaatagaaaaaacaccaaaatacttagtgttctttctggagattttatgaaaaaagtttaggatgtttatagtataaccgcccttacttaacgtttccttaaaagctcggttattaacattacttcctaaattactatttatattctccaagaaatgactactattaagctaaaaagcgctattgacatagcgctttttagtctagtattatttagtttcagtagtaactccatcaaaatcttcttcattttcttcagcttcttctcttgtggcacggataataccatctttgtgatgagctggactgtaaattgtatagagttttaacatctcagtttcagaagtgttaattacgttatgttcagcacctgccggaactattatagcgtctccatctgcaacttcatattcattaccatcaatgacaaccttaccatgaccagcttcaaaacggaaaaactgatcattttctgcatgaatctcgctaccaatttctccaccaacaggcagtgtcattaaaacgagttgacaatgttctgcggtatagaggacttggcggaaatttgtatttcctagtgtcaatttttcgatattcccatgaaatcctttcataacgatacctacctttctatgcctacagtctactctttttgctccttactgtcaaaaatttagataagagtctgacatttttaataatatctactgttccttgattcctatcatttcattgcaaacctaaaatatagcctaatgacaatagctatctatagctttagaaacaaataatgctgttccctggcctccccaattatcaatagacttttggaaacgctcatcttggatgtacattattccaagacttgctaataaatcgttagtgcagttgtaaaactgagctgtgatataatcttgtaaaatctgaacttgtttttgaactttctcatctgtcggagaaagttctttcaactgtccaaagtctttaaaaatctgactcatagcttgtgaaatcattgaaaaatcattcttactatggctattttcaaattctttgtaactatctgtatccccccagcgtgttctagcttcctcttgaaatgcttctaattcttcttgattataagctgtaaaatctgacatatttttacccctctggatagactttgcatgttcaattacttcttctagtcgctgtttctttagttccagccacctaatttgatcaagaagtgcttgattacgatcataatttggactatccattatctcttttatttttttaagaggaaattccagttccttaaataacaaaatttcttgtaacttaatcagtgattcatcatcatagtaacgataaccattctctcctacaaatgaaggagataacaaatctatttcatcataataatgaagtgtgcgcacactaataccagaaatgtgacttatttctttaactgttttcataataacctctctgtaaagagtataatgtataacgttaagtaagggtcaagggaaaaatattattttgtgatgattaatttataaagcttaaatcaaaggtcactttgactaacaggttgataaaaagggatacgtccccatgtttgctctgctatattagcatttcccatctgataaacagaatctgctcgttgcgtcaaactatcccacgtttgtgaaccaatcctcgtcacgatatccacagacttcttcacagactttaaatgctgttgacctttttgtgtaaaacctaagacatgaatagcatttggtataggactttccacagcatttatcaagatataggttaataaacgtcgaattcttgctttggtataccgtttagttgcgactttatcaactaactcatccacagtctccacataacgaatttgactttttatacgattggctatctcttcattcacttgataaatttgtgtcaaatcagaatgcgtcattatctgatatttgagtaaactaaaataatcttgccaaactacttgtggactattcaaaaacaagtcactgttaggcatacctttttctacaaagaaacgatcagattgatgtttacgaagacttgttgcagaagcaaatatctctgttttttctgatgaatgataaccagctccttgacgttgtatcggatttaatcgaataccattttggctagctgctttggtgtaggctaagcctaaaatgtgatttggggtttgtcccgaaaatgtaatccctgcaaattcttgccacatagcttgcattttttgtggataggaaagagaatccgattgttttttcaaaaaagcttccatctcctcttttttattcacataaatatccccaatacgggcataatcaagcatttcttcggtaccgaagcataagttatccacacctaatcgtgccaggatagacacagctccactagcgaaataatccgctgactgtaccgaaaccagaaaagggagttcaatcactaaatcagcaccattttctagtgccatctgggaacgggtccatttatctacaatcgccggctcaccacgttgcataaaattacccgacatggctattacttttatgccttgagcttgttctaaaaggtacttatgcccattatgaaagggattaaattcggcaacaattcctgtaactgtcatacttctttctctttcaattgattatttaaagtaacagcatcaataatatctaggtgataagttttacgaaggtatatgagacgatctgtttctttttcaaatggttttaatgccgataataaatccaaatgaagtttagggttcatcaataattccaaaataactttagactttttctgacttacccgacgttcaataatataaagtatcccaaatatcatcagacaagcgtataagaatattatcatctttttacctccaaattattacttatttatgagctacaaaaaaccagcgagcagaagttgcagttggttttttatcttcaaaatctgcatacaccttaacatctttaaaacctgcctgttcaagtaaaatatcataagtcaaaatatcataagtacgctcttcatgaacttcatcatgacgtgtaaatcgaccatcttcttcttgaacaaaaaatgttaattcatggacaatagaatgaggtgcatcatcttcataagtatcccacaccatagcaaagtcatctgcattttcatgataagaataaccaggaaatactttatctgtttgataagtcgaatgaacatcaaaaataaagacgccattttcttctaaggccttatagacttcgataaaaacatcaccaacctcgacttcatcttgcatataacaaatagagtctgaatagcacgtgatgagatcatatttaccaacattagataaatctaacatatttccttcaataaactggatactttggtgagcagaagttgcacgttttttggcaagtttcagcatatcgccactaagatcaagtcctgtaacagcataaccagcttgtgcaaatcgaacagactgaattcccgtaccacatgctaattccaaaagttttttcttaccttttggaaaatgacgaagtgaaaaatcagtccatttagcatataaagtatcatccatgacagcatcataaacagctgcaaaagtttcatacgttgccatataatagttctcaaatctttcttgatattacatctctcaaaaagcagtcccaagactgcttagctttattctgtcataaagacttcagcatcaagcaatggtgcttcatgccaaagtttttcaaggttatagtgctgtctctcatcttcagagaagatatgaaccacgacgctattgaggtcaagaagtacccaaccagctttactatcgccttcaaggtggctagcatccccaccatttccttttacttgttcacggatattgtctgcgattgcttctaactgcctactattacttgcactcataatcacaaagtaatctgcaacactcgttacaggctgtaaatctaaaattacaatatcttctgctcgtttttcatccgcagccttaacgactagctgtagtaagtctttttctgtcattttattcctcgtttattaatttcaataagctatcttttgctaccattgtcgcaaaacgatgatgccaaatattctcgtaatgttttttaatagaatccccacttaaagttggtgtatcaaatgttaggtgtccaccttgtggaataaagatatcataaccatattcaaaagcaacttttactgatgtatcaaaacagtattctgtttgaagtcccatcatgattaattgactaatatgcttactttgcaagtaatcatgtaaatgagtatctttaaaacaactattgtaagttttatcaattattttgtgatgcgtcacaagatgtcgctgttcccaaatttcccactgtggagaaccttgaggcaattccttatcatgatgccttatccatatcacttcacaattagaacctttggcacttaaaagtaaatcatctaaaagcactgcaaaatttgttaaatgctttggtttcttatccataataccttgttggatatcaattagtaaaagtgcacaagtcatactttcctccaaaatgaccactgcatcgccaaacctatcatgaccattattcaataaaagaattagtcgagataaggtatataagcattataggtttcaatcgttttaggatagataggctgagccttacttgctaaaaacgcaactgttctagcagtctcataagctactgctttattaaggtcaactttcgctaactcacgagcttcttcaactcctggaaaatctcgattgtgttcaatgtaatctgctacataaacgattttatccaatgtggacatttgggctgaaccaacagtatgttttgcaatagcagctaaaatatcttgatctttgatagctagatcctcttgtattttataaatgccaacaagaccatgccaaatattattaccccatttttttaggtcgggatctggttggtatttatcaattaatctaagaaattcatcatcagatagttccttagcataatcatgtaataaagcagctagacccgctttttccttgtcataaccataccgttctgctaactctattgcagcacgctctactcctaacacatgattaaaacgtttgtcggacatcatatgacgcactttactcaaaagttcagtccgatctaaacctgtgtaatctttgtaggtcatttgtaaagaccttctttcctgatataatctaatacctctctaggcagtaaatagttgggctgacgattacttttaataaattgacgaatcatacttgatgagatatccatcaatggcagatccacccaaataacgggatatgatgtaccagctttatattttggacgttgaacaccaacaaactgcaccattttaacaagttcatcaatacgatgccacttaggtagatattccaccatatctgccccaataatgaaataataatcaacatctggatttttttcaattagaagcttcatcgtatcgtatgtatagctgatacctttacgttcaatttcaattggttcaatagataaaccatcaatgccttctattgctaattcaagcatcttgagacgatgctgttcatcaattgtctcttttttatcaatatgtggtggctgaaattcaggcatcaacagaacttggtctaaacacaattgctgacgtacttgatctgcaacaacaaggtgggcgttatgaacagggttaaaatttcctcccataattccaatttgttttcggttagtatctcgctttttctcttctaattcaacttttgtaaatggtgttagcaattcgagtgccataattcctccatgaacaagtagtatctctaaaaaaacaaacactgattatcatgatcagctatcatacggaagtgtaacttaggtaaatcgttttttagttctatactctatttcttaatctattgtagtttagtttgattttactgcttttactttaactgaaattttacgattttctttgcgcgctgactctttataaagaatcaagatacgtcctattttaaggacagtatcgcagccaatttcatcttccagaacttcagcgacatcgtggatatcttcatcggtattttgtaaaagggttactttgattagctcacgtgcatcgagtgcattacgtacgcttgttttgatttgatcatttaaaccatttttcccaatttgaataatgggtttcatagaatgtgcttctgattttaagaaagcacgttgtttagatgttaacatattagtttcctttttatctattataggattatgactgtatcatcagctaaattagatgaaaaaccgtcatatgttgctggttaatttagttattaaattaaagctttgcgtaaaacaactgccacgccttctggagcccaagcagctactactactggattttctgcttctgatttcacacgtatccaaccaagacccgaataaacaatatccattttatctttgattgtaaattcatgacgaactaatttaggaaaatctgaaacttccttacctgttggtggtgtcaataattttccaacatgtttagtgtaaaattcatctgctccaactagtttagtgcggtgtaaattcaggttattatcaaaatatgccgtaaaaccttgtttttgaccagaaataaaatcaaaacgtgctaggccagccaagaataatgtttgttctgaattaagctgataagttttgggttttatttcttttttaggactaacatatttaagattttttgctgtcaaataatgagccatttgatgacgatgaataatacccggggtatcaaaaatatagctaccatcatcaagaggtatttctattttatctaacgttgtacctgggaaacgtgaggtcgtaataacatcacgactaccagtaatttcacgaataatagcgttaataagagttgactttccaacattagtaaccccaacaacataaacatcttgaccatgacgatacttttcaatcgtatcaatcaaatccttaatagcatgatgattttgggcacttgtcaagatgacatcaacaggacgaagcccctcttcatgagctctctcagttaaccattgtgttacttttccatctttaaccgatttgggaagaatatcttttttatttcctactaaaagaacatcgtttcctgcaacgaaacgactaagaccaggaataattgaaccattgaaatcaaaaatatcaatgacattcaccacaagggcatcactatctccaacctcatgtagtaatttcaaaaattcatcatcagtgatatgaacgtcagtaatctcattatagtggcgcaatctgaaacaacgctgacagtataattctcctgtctctaaacctttttcaagtgctgcacgaggtgtatagccagcagcatctttattttcagtttgaatcctggctccgcagccaatacaaaataactcttccattaaattcctttttgatatacgattttaccgtaattctcttctatttttttccaaacgcgacgttcacgtaagcgattgaacttggtattccaagcatcagatttaacaattggttttaccaatacggactttattcctgcgcgatgactagcacgaatatctgtcatcaattgatctccaaccataatcacctcgtcacgatcaaagccataacgctcaattgccatgtttataccacgagtaaatggtttcatcgcacgacttacaaaatccacaccaaaacgtgatactgcacgttctacgcgagcatgattgttattagacactactacaactgaaatatccgctgttgtcatctcatctaaccatgcacgcacctcagcagtaccatctggattattccaagcaatgagtgtattatctaaatcaactaaaaccgcacgaatgccatgacgtaataaatcttctgctcttaaatcataaactgcctcaaccacgaaggtcggcctataatcatctatactcaatttcatctccaaaaaatatattttactattcattctaccataattcttaagagatagcgagtaaagaaaaaaggtctttaaagacctttaaattagggtttcaaccccaaaagatactatcttactcgtttcattttcttcaatgcaattaaatctttgtaagagattagagttacagcaagaaaaataaacagcatcccaagtaaatctattggataaaaaatttctcctaaaacaagtactgtcaaaaataccgaagaaactggctctaccgatgctaataagctacccttgacagcacctacaatactaacccctttaaggaaaaaagtgtaagcaaaaatagtcccaataccaataatgccaatataagcaagtatactcatcacattaatttgtaaggggtattgccacgcttttgtcaccaaactaaataaaatcccacctataaacattcctgaaccaataacaatcgtacttccccattcatgaataagtttcacaggtaataaaatataaatagaataagtaatggcggaaccaagcccccacattaatcctttcggtgtgatagctaaacttcctaacttcccatgcgttgcaatcatataggttcctaaaattgccatagcaattgctattatttcaaaagatgttggtctttgtctgtttaggatacaaacaatactcaaaataagtattggtgccatatattgcaaaaccgttgcagttccagcatttgttaaatgaatcgctctgagaaaagcatattgatttaaaactaaaccaaatatagaaaaaagtaaaacctgctttaaaaattttggctgtttccacgctgctactaaatgctccttttgttttgatctagctaaagacaagagaaagatacctgttatcaacaatcgtaaagaagtcaaaaggttaacgtgtactccgtgcgacatcaagtattgaccactaattccagaaatgccccatgctagtccggcagctaaggtcatcattgttcctttttcttttttagtcatttttcccctcatttttatttcttaaacactgtagttaaagtcatctgataaatatcttagcttcttaattatttatccctaggtgttcgtgctaaattagcgaataaaaaccagccaaaaggctgatttctattcttcttttaattttgctaattcttgcgctaacagcttcagagcaacttgtggattagcttgtccttttgttgctttcattagataacctgtgaaggccttatcagcattgcgttttcctgacttaaagtcaatcacagcagcttcattatctgcaaagacttgatgaataattgggattaatacttcaggatctgaaatttgaactaaaccagcctttttaacgaattcttcagctgaaccaccatttttagctaaatgcacaaaaacttttttagcaattttggatgaaattgtaccgtcagcaatcaagccaatcatctcaaccaaattctcaggagtcagaccaatttcttcgattgattttgattcactgttaagaaattgcgccacttctccttgtaaccaattggaaacttgttttgcatcacccccaatagcaacagctttttcaaagaaatcagaagttgcttttgtagctgttaattggctagcatcataagatgatagaccaaaagacgatacatatttcgcacgacgttcctgtggaaattctggtaattctaaacgaacttgatcaatccattcatccgagatatcaaatagtggtaaatctggttcagggaaatagcgataatctgatgagccttccttgacacgcatcaaaatagtctcacctgttgtttcatcaaaacgacgagtctcttgctgaatttgaccaccagatcgtaaaacttgtgcttgacgtttttcttcatgtatcaaacctttacgtacattattgaatgagttaaggttcttaagttctgctttagtaccaaactcttcttgaccataaggacgaagtgaaatattggcatctacacgcatagaaccttcttccattttaacgtcagaaattccagtatattggataatctctttgagagctgtcaaataagcataagcttcctcaggagaacgcatatcagcttctgatacaatttcaatcagtggaacaccttgtctattaaggtcaacataggaataaccatctgtcccatgtgtattttttcctgcatcttcttcgaggtgggcacgctcaatacgaattttttttcgtgtaccatcttctaattcgatttcaatccaaccattgtaaccaataggctcatcaaactgtgaaatttgataagctttaggattatctggatagaaataatttttacgatcaaaatgcatgttttgatggatatccatattcaaggcaagtgccgccttgattcctgcatcaataactcctttattcatgactggaaggacacctgggaaagaccagtcaattacatttgtattagcattttgttcctgaccaaaatgagcggaagaaggtgagaaaattttagagttcgtatttaattcaacatggacttcaagtccaatgactgtttcaaaattcattagttctcacctccaaaaattttaggttgttgtttatgataatctgtcgttgcttcgaaggcagcagcaacctgatatattgtttcttcactgaatttcggaccaatcaactgcataccaaccggtagaccttgatcaaaaccagcagggattgaaatacctggtaaaccagccaaattaactggtattgttagaatatcagctaggtacattgcaactggatcgtgatttaaagaatctaagtcaaaggctgttgttggagctgttggacctaaaatcaagtcataatctgcgaaaactttttcaaaatcttgaataatcaaactacgaacttgacctgcttttttataataagcatcgtaatacccagaagataaactgaacgttcccagcataatgcgacgcttaacttcgtctccaaaaccttcagatcgtgtattgacatagatatcatccaagtttttataattttctgtacggtatccataacgaataccatcaaaacgttgtaagtttgaagaagcttccgatgaagcaacaatataataaacagcaacaccgtatttagaatgcggtaaactaacttcctcaataactgcacctagtttttccagatgttttgcggccttaataatcgtttctttaactccttgcgctattccttctcccaaatattcttttggtaaagcaattttcattccttgaatatcttgaccaattttagcagtaaaatcgcctacagtacgctcagaagaagttgaatctcttacatcatgcccagaaataactgtcaaaagctgtgcattctcttttactgtttgagacatcggtccaatctggtcaagcgaactaccgaaagcaaacaaaccaaagcgtgatacacgtccgtaagttggcttcataccaacgattccattaaatgaagccggttggcgaattgaaccacctgtatcagagcccaatgataaacgtacttgtcctgaagctactgctgctgcagaaccacctgatgatcctcccggaactttactatggtcccaagcgttatttgtctttttaaaataagatgtttctgtagagcctcccatggcaaattcatccatgtttgctttaccaatcacaatcatatctttagcatataacttttcaacagccgtagcatcaaagattggctcatagttatagagcattttagaagcagctgttgtaagaatcccctttgttgaaatattatctttaactgctaagggaatacctgacataacattatcagcatcaattcctttatcatcaatttctttggcttgagctattgccatctcatcagaaatagtaataaaagatccaaccgcttgttcacgcgcatgaatatcttccaatgtagcttttgttaattcagttgctgaaatttcttttttaacgagaaaatcatgcaactgatcaattgattgattattaaacgacattaggcatctcctccatcctcaagaattgcaggtactttaatataataatcttgatgctgtggtacatttttaaataagtcatcacgattatggcctggttgagcaatatcttcacgcatcacggttttgcgatctgccatggtcgttgttactggtacgccttctgtgtcaacttcatttaagagttcaatcatatcaacaatctttgacaaacttgacgcaaattctttagtctcttgatcagaaaagcgcaattttgacagattggcaacatgacgcacttcttcttcagaaattttcatgagttctccttatctctgtatcattttcgttttaagatagtctctactattatagcatattaaactctcaatgttatcacattatcccagcttttcataataaacgcttcttacctatgataagaagcgtttactgtttatttatctattgttatatcatttctgctttgtttgattttagcctgtgcagccgctaatttagcaataggaatcctaaacggcgaacacgatacataatgtaaccccagttggtaacagaactcaatagatgatggttctccaccatgctctccacagatacctattttaaggtttggcttaacttcttttcctaacctcactgcctgcccaataaaccttcctattcctttttgatctaaaacttggaaagggtctttttttagaagtcctttatcaacgtattctcctaagaattttccagcatcatctcgtgaaaatccaaagctcatttgtgttaaatcattggtcccaaaactaaagaaatccgcaaactttgcaatatcatccgctatcatacaagctcttggtgtttcaatcattgtcccaatagggaatgataagttaatttttttagatttactctcctcaacaattgtctcttcaatcagatcacgtattatagagatttcttcatgcgctgtcactaaaggaatcataatttctggctttgcctcatatccctctttcattgcaagtatagcgccttgtacaagagctctcacctgcatttggtaaatttccggataggtaatcgcaagtctacaaccacgatgacctaacatagggttgaattcttctaatgtttgaatccgtttttcaatagctaaagtagatatccccatttgtcttgccatagattctatagactctttatcatggggtaagaattcatgtaaaggagggtcaagcaaacgaatcgtacaagctttacctttcaatactttaaaaatttgataaaaatcgtctctttggaaagataaaagcctttctagagccttccttcggctcaatatttcatccgctaaaatcatttctctaacgactggaatacgttcatcgtcaaaaaacatatgttccgtgcgacaaagacctattccttctgctccaaagtccaaggccttttgagcatctctcggattatctgcatttgaacacaccatcatatctcgattttcatctacccatttcataaatatctcaaaatcacgatctacgctagtctctgccatcggaacttgtcctatataaacatttcctgtagcaccatcgattgataacatctcaccttcttttatcgtttgatgcccaatagaaatttctcgtcttacttcatcaaccaataattgactacagcctgcaacgcatggtttccccattcctctggctactactgccgcatgggaagtcattccgcctcttgctgttataatcccgtttgcactaaccatcccctcgatatcttcaggtgatgtctcttgtctgaccaatagcactggatttccctttttcatctctttaacaacatcttctgcatggaaataaactttcccataagcagctccaggagaagctggaagtcctgtcgtcaaaataatagctttctttaaacttttcaagtcaaaagaagggtgtaataactgatctaattgtttgggctcgatacgtagtatagcttcttctttactaattaggccttcatttacttgatctactgctattttgatagctgccttcgctgtacgcttaccgcttctcgtctgaagcatataaagattaccattttcaattgtaaactccatatcttgcatatcgcgataatgagcttctaacttttgggtaacgcttacaaactcttggtaaataataggcatttgttctgccaattttgatatggattgtggtgttctgatacctgcaacaacatcttctccttgtgcattaatcaaatactcaccaaataaatttgctgctccagttgatgggtttcgtgtaaaagcaactcccgttccgctgttatttcccatattcccaaaaaccatagcttggatattaacggctgtcccaagcgtctccggaatatcatttaatttacgataaatcttagctcttggattattccatgatttaaaaactgcctcaattgctaacaaaagctgccttttaggatcttgcggaaatttttctcctgcttctttttgatatagttccttgtaaaattcaacaagtctctttaaatctgaaccagttagttctgtgtcatcttgataacatttatctgtcttaagtcgatctaaaatggtatcaaatttatattttggaatgcctgtaaccacatctgcaaacatttggataaaacgacgataactgtcataagcaaaacgctcgtcttctgtctttttcactaaaccttggacactacgatcatttaaccctaaatttaaaactgtgtccatcataccaggcattgaaaaaactgatcctgaccgaactgacaccaacaaaggatcatcaacacttcctaattgcttgttctgttcaacctccaattgtgccattgcttgatcaatttgactaagaatactctctcggatatggcaagcgttatcataataatcattacaagcctgtgttgtaatagtaaaaccttgtggtaccggtaacccaatactcgtcatttcagctagattagcccccttaccacctagcagttccttcatttccttacaaccttcatcaaaatgatacacaaacttagtttccatcagcgtctccttttacagatttttagctacttgtccatttgtttttaagatttctaaaataatcgttgctgtttcttcgattgctttatcagatacattaatgattgggcaacctaaatttttcataacttcttcagcatacctcgtctcctccaaaatccgttctaaactggcataatttgccgtactagaaagacctaaggactttaatcgaacttttcggacttgattaagatgatcaaccgaattagttagtccgataatccttctagaatcaatcatacgtaattctttaggaacaggaacctctggaaccaaaggaatattaataactttaatatttttatctgctaaaaacatacttaatggtgttttagaagttcttgaaattcctataataactaaatctgcttgtaaaatacctcgcggatctctcccatcatcatattttactgcaaattctattgattctactcttttgaaataatcattgtctaagcgtcgtaaaatccctggttctcccaaaggatctatacccgatatccttgatattccttgaataacatttgttaataagtcaacataagcataatgttcactttcacatcgtttctgtgcataggaagccaaagcaacatcaactaaactaaacatcataaatactgtcttctggctagcctcttcaaaaacttgttctaagcgttcctgactgttaatataggaaaaacgttgaaaatgccaatcatcatgtcctggaaattgtgacaaacatgctttcgcaatagctttggctgtttcccctaaagaatctgaaataataaatatagtgagttgatcttccatcagtttcctcctaataatctcttatttctaaaaacaaactagcgaggattgttttagataatttcccgatcactttaaatttttcgggatattgcttatcatgacgaacgacagggagactatccacttttctgctcactaatttatcagctgccgcaaaaagactttcattttctaaaacagttgtcacgtgtggcatacgtgtcatcaccattcctattggcattttagaaagatctcctccgccaatactgatttttagtaaatctttacgtgacacgactccacagagaaaatcatcatcatccaagataaaagcacaaccagcatcttccataaaaatatgtacaataacatcataaactgaatctttttgatgaactgtcagagggatccccataatttctgaaactgtcatcttttcaaaatgacttgtccctattgaagcatgatactgtcctaaataaaaataaccaaccttaggttttgcatctatgatacctagcatacttaaaaccgccaaatcagaccttagtgctgctcttgttactcctaatttctcagctattagctcaccagtaatgggctgaaactgtttgataatatcaataattctttcttgcctttgatttaattgaataagatcaccttctttatatattgtatactatttattttatatgttatattatatatctttttttactgaaatcaagtaaaaaaagatactattttaaaaataatcatactatatatttgcttttagacatatcttttgttaaactttcttcgaaaacgttttcgaatataagtatcggaggttgtaatatgacaattaaaaatctcactgttgcaggaagtggcgttctaggtagtcaaatcgcctttcaagcagcttacaaaggaatgtctgtcaccatatatgacattaacgatgaagctttaaataagggaaaagaacgcatcaaaaaattagctaaagtctatcaatcagaaattgaaacagcaaaagaagcatatagtgataaagctaaaagtatcaagtataataaaaacttattgcctagcttagaccatatttttctttcaaaagttgccgattcattagacttgattgctgatttaccaaaccaaattactttttcaaaaaacttagaccaagctgtaagtgacgccgatttagtaatcgaagctgtcccagaaacagttagtataaaagaagatttttataaacaattagctaaagtggcaccttcaaagacaatctttgcaacaaattcttcaacacttgttccaagtcagtttgctgatataacaggacggcctgacaaatttttagcaatgcatttcgctaacaatatttggcaaaataatattgttgaaattatgggacataagggaactgacgacgaggttatcaaagaagctttggcattctcaaaagatattggtatggtgcctttacatattcataaagaacaacctggctatattcttaattcaatactagttccattcttagagagtgcactagcattgtactatgataaggtttctgattctgaaactattgataaaacctggaagttaggaacaggagcaccgatgggacctttagaaattttagatattattggcatcgataccgcttataatatcatgaagaattattcagataccaacagcgatcctaatagtcttcatgctcaccttgcaaaaatgcttaaagaagaattcattgataaaggacgtaccggtaaagctgctggacacggcttttatgattacgactaaactataaaagaggttagataaaaatctaacctcttttataattcaactaaagaatagttgcaccaagaacagttttaaaatgatttaaagcccattgatgattactatcatttaagctagctacagctgctgctgggacctcaattttataacctaagttataagcatcaattgctgtgtgtaatacacaaatatctgtcaatactcctgtcaatatcaaagtatctactcgtctttcacgtaggcgaatatctaaatcagtgccagaaaaggcagaataatgacgcttatctatccaaaaaacacgactatcttccttaatagtttcatatagagttcccaaaggaccatataggtttctaccagaagtccctttaatattatgctcaggaaaaagattgctctctggatgaaaaacatctccaatatcatgattatcaatcgcaaaaaaaatataatcccctgaccggtatgctttctctgtaacgtcagctatagctgaagcgatagattgcgctggtttacctgccgttaatttcccatcatctgccacaaaatcatatgtgtagtctattgagatgagtgcttttgtcatttttcttcttatctcctcttgatttcaaaaaaggaactgaaagctactcccagtcccatgctatgattaattatattcttttaatttgtcaaaaataccttcgttaataactttgaggtatgttcccttcataccgagtgagcggctctcaatgattcccgcagactccaatttacgaagagcatttacaataacggaacgtgtaattccaatacggtctgcaataacagatgccgttaggcgtccttcaagtccatctaattctcctaagatagcagctacagctttcatttctgaataagatagagtgttgatagccattgtcaccgctgtttgtttacgaatattttcttctagattttctgtttgaaggttaagtaattgaataccaacaacggtgcttgcaatttcaactaaaatcaaatcatcgtcgctaaattctttatcattacgccagataataaatgttcccaagcgcattccaccaccataaattggagcgattgttgtaataccatcttggaagttttcctttgtctcaactgggaaaattgacaaatcattatctactgataagttagcttctgtatcataaacacgactagcagatttaacatagtaatctgggaattgttttgtttcaaaaaattcttccacacggtcagtgtttgttttatatttcatggcatagccaagtaagttaccaccaccattaataatacatgcgttacagtcaataatatcagctaattgagccgccattgtattatatggtagttcggcatctaagctatctacggaacgctgtaagatggatgtaatttttctagttttttctaataaattcggcatttccttcatcctttgtatgttttgcgttacaattatatcaaagcattttagcttttgcaaatcgatatcagtacattttaagaacttctattgttaatttaatgtttatctaataaaaattcattctagcgcttgtattggcttaaaaagcgagccattttttcttgtagttcagtcaattcatcaacacgtggtaagtaaacaattctaaaatggtcagcggtattcatattaaatcctctaccgtgtgttagtaatactttttcttgttttaagaaattaagcacaaactcttcatcattatcaatacggtacatatctgtatcaattttagggaaaagatacagtccagcatttggttttacagcagataaaccaggtatttcattaattgctttatggatataattacgttgctcgtagatacgacctcctggcaacaacatactatcaatagattgctgtccgcctaacgatgtttgaataacctgttgagcaagaacatttgaacacagcctcatgttagctaacatattcaaaccttcaatataacctttaacatgttgtcgcggaccagacaataccatccaaccaacgcggaaaccacagatgcgatgtgatttagataagccagataaagtaactgtaaaaatatcctctgcaatagaagcaattgggatatgctccattccatccataactaaacggtcataaacctcgtctgaaaaaataatcaagtcattttgtctagcgatatccacaatctcttgcagaatttcacgcggatagactgctccagttggattatttggattaatgaggacaattgcttttgttttggatgtgatttttgatttgatatcatcaatatcaggataccaattagcttcctcatcacaaatataatgcacagcatttccaccagcaaggctaacacaagctgtccataacgggtaatctggcattggaactagaacctcgtcatcattatcaagcaaagcttgcattgacatagagattccctcactaacaccattaacaatgtatatatcatccatgtcaacatggatgttttgtaactggtaatactgcataacagccttacgagctgaaaaaatacctttcgaatcagagtaaccttctgattcacgcgcattcgtaattaaatcacgaatgacttcatctggcgcttcgaagccaaaggcagctggatttccagtatttaaccgcaatatcttttcaccatttgccctcatgcggtccgcctcttctaaaacagggcctctaatatcataagctacatgttccagcttcattgatttatcaaatatcttcataaaaatacctcgtatcttccattataaaacaaatattctcaaaattgaaacttttactgcggtttatcaagcgattaagttaatattaagctatttcagaaaactaacataaaacgctttcatttttctagaaaaaacgttataatatagctataaaatgaataaccaacatatctaacttactcatcactcactccttctgataagatggctagttgagtgcaagaggttatctcttttggttatatttagaggaggacaggcttatgtcacaaaaatatgaacgcatccttgtcgctattgatggatcaacagaatctgaacttgcttttgaaaaggcagttaacgttgctcttcgcaatgattctgaattaatcttgacacatgttatagatacacgtgctttacaaagctttgcgacatttgatacttatatctatgaaaaattagaaaaagaagcaaaagatgtccttgaggaatatgaaaaacaagctcgtgaaaaaggagcagataaagttagacaagtcattgaatttggtaatcccaaaacattacttgcacatgatattccagaaaaagaaaaagtagacttgattatggttggtgcaacaggtcttaatacctttgaacgtttcctatcggatcttcctcagaatacatccttcgtcacgctaaagtagatttactcattgtacgtgaccctaataaaacaatgtaaatttaaatacgctcactttctaaaatatcctgagttatattaactcaggatatttttattttcgatttaaggatttctgaatttggctatctaattcacgtcgaattgatggctcaggagcgaaatgttcttcccagtcgtctggttttaaaattttatgagtaacaggatcaaaatgagctttgccatctggaaagattttccccatattggcctcatgtactgtatcaaaaagaggttttgggtcgactcccataagaacaaaggagccataagtcagataaagtaaatctgttaaggcatccacttctcccactaatggtgtttctggatggtctttagaaataaccttatctcttgctttatcaatagctaagtgtaaattacggatagattggtcaaatactttttggttaccttgactagcagcatacaagaactcaacgatttcttctactttaaagtctgacctgaaaccagcttccttactgtcatataagcgtggcgtttcaatagtttcaccatccattaatagatggaaggattttactttattgaaattctcgtcacgactactgaatgttttttcaatctcaaattggataagtccataatgggctaatgccttagagataccatcatcattattgtcagcagttgtataacgtgcattttctctcacttgctgactagcgttccccatggcaacaccaatgccaacttgagataacatctcaatatcattatcagaatctccaaatgctatcacttcggatagatcaaaaccatagcgttgaccaacacgttcaattcccttaacttttgactgcccttcagaaatgacatccattgagtaaggactgcttcttgttaatttaacacgaggaaattgtttttgaattcgctctgattcgccctctgttgcaactaaaacgacctgataaataggttctcgtaagataaccatgaggctatcaatattttgaggtttaatccgacgaataaaatgcttaaagcttcgttcaatcgcttttgcccattttctcggaacaaggctagatacaatctgccccaaacggctagttcctagaccaataatacctgaaccgagtaatcctgaggctgttcctaatgaaatttctcttcttcttgctccagcataacgaatcagacgatagacagttgtcttagataattgattggtataaataatttcacttctactatagatatattgaccattataggttacagcaaaatctaaaccaaggttttctaaaaaaggttgtacaaaactaggacctcgccccgttgctaaaccgactagtattccttggtctttcaaatttcgaattgctttaattgttgacttttgtacattcttacgatcattaagaagtgtaccatcaatatcaaaaaatactgccttaattgccactgggtcaacatcccctcttttttatgataaaataaattatatcacaacttgaaagaagtataaaatcaatgaaaaaaatccttgttctacacacaggtggaacgatttccatgaatgctaacgagaagggacaggtcatgtccagcgccgataacccaatgaaatacgttgatttatcattagatgaccttgatttgactgttgtagattttctaaatcttcccagtcctcaaatcacccctcatcatatgcttgatatctatcactatctgaagcaacatgccagtaattttgatggtgttgtcattacgcatgggactgacactttagaagaaacagcatattttttagacacaatgatactccctaaaatcccaatcatcattaccggtgctatgagaagcacaaatgaacttggtagcgatggcgtttataattacctatcagccctccgtgtcgctaatagtactaaagctgccgacaagggggtgctagttgtcatgaatgatgagatacatgctgctaaatatgtcacaaaaacacatacaacaaacgtttcgacattccaaacccctacacatggcccccttgggattattatgaaacaagacctgcttttctttaaagcaactgaagagagagttcgttttgatttagataaaattacaggaactgttcctatcgtgaaagcatatgctggcatgggtgatagtggtatcattagctttttaaattctcaaaatattagcggattagttattgaagcactcggtgcagggaatatgcccccaaaagctgcacaagaaatcgaagaattaattgagcaaggtgtccctgttgttctagtgtctcgctgttttaatggtattgctgagccagtttacggatatgaaggtggcggagcaaaattacaagaatctggtgtcatgtttgttaaagaactaaacgctcccaaagccagactcaaattactcattgcactcaatgcaggtctcacagggcaaaatctaaaagactatattgaaggttgataaaaaactctagaaatatttctagagttttttattaattttcagtttgtaatactctctcaacactgctaataggcatttcttgattcgttattaattgaaatgcttctgctccttgataaatcagcatccctagaccattataagcatgtttcactccattttgtctaacaaatcgtaacaatgctgtttctttaggcttgtaaaccaagtcgacaactactaaattcggtgttaaaatttctggatcgttaattaaactataattatctaatggcctcattcctaaactagtagcatcaatataaaaatgactagttctaatagcgtctttaaatgctgtcttattttctagataatcaacgactacctttatttgaaactgttttttaattttatctgataagtcaatgaccttatcgtaatttgagctgttacgattaaataatctaatttccgcaactccctccatagctgcttgaactgcaactgctttacctgaaccaccaataccagctattgtaattattttatttttagcactgaaaccttgagctgctaaagctttaaaacaaccaatgccatctgtcatatggcctactaaacgtccggttccaccttgattaacgatagtatttacagcacccactaatttagcttgaggagataaatcatctagcaaagggataacactctgtttaaatggcattgaaacattaacaccacgaatacccaatgccctgacacctcgaacagcttctgttaatttaccctcttctacttcaaatgtcagataggcataattcatgtttttttcttgaaaagaggtattccacattaacggggatagagagtggcgtgcaggattggcaattagaccagttagtaaagtttccccatttaatgaattcattgtataaccttctttcttaacaatttatttcagttcattttaccaaaaactgactcaattaaaaagagagtatgtaatttatactctctcccttagtttaaggcaatatattacctgcactacggtaaatatcataccattctttacgggttaaagcgatatcattagccttatcaatcgcctttaaacgagatggattcattgaaccaacaatcgcctgcattttggcaggatgacgtaaaatccatgcaatcacaatagcttcgctgctaacattgtagttttttgccagtttagctatggtttcatttaattccttataatccggatgattaacaaataaaccacgagataaatcaatttgaaatggagaccaagcttgaatggtaactcttttaagacgacaataatcaacaatgccatcatcatgttcaattgaagctttatttaacatgttaacatttaaccctgcatcaaacattggtgtatgtgctggcgataactgaagttgattcactgctaagggctcgtcaaggtaggattgtaacaactccatttgaaaccggttttgattgctaacaccaaagtgttttactttaccttctgccctcagtttggtaaatgcttctgctacttcttcaggctcaactaatacatctggacgatgaagaatgagaaaatctaaatattctgtccctaatctttctaaaataccatctactgatgataaaatatactctttagaaaaatcaaagtaaccttctcgtatcccacatttagattgaataatcattttgtcacgattgacatttaaatgtttgattgcatctcgaaagcgtaattcagatagccctcccccataaatatcagcatgatcaaaaaaattaatacccaaatctaatgctgttccaactacttcttcagcttgttttcctttcaagtcactcattctcatacaacctaaagcaattcgagttgcttgaatgcctgtttgtccaatgttttgtaacatatgcaccccattctaatctgtttgtattaacagaaagattaatcaattcattataacaaaatttctatgaaaaggcttactattacaaatgcaaaaagctgagtaaatttaactcaactttttttctgatactcattattgactaaataagtcggtaagaaaaatctattctgaaaagtactattataaattacagtaatcattattgtcataacatacctccacatctgtgataggaatatcatatgacagcaagcttaaactgagcttagcacagccttaatagaaacttaatcaaaatctgaatgttggcgtaaattatctagaataagtgcccattctgtattttctttccaattattatctttgacaatatcactagcaacacgtctggcttcttctaaaataggataatcctcaacgatatcagctacttgaaattctggaattccagactgacgagtaccaaagatttcaccagaaccacgcatttttaaatccgactcagctaaaacgaaaccatctgtcgtttctgtcatgattgtcattcgttttttcccagaatcagttttgggattagccactaaaacagcgtatgattgtttatatccacgaccaacacgcccacgaagttgatgtagctggcttaatccaaaacgatcggcatccataataatcatgatcgttgcatttgggacatttacccctacttcaataactgttgtagatactaaaatatgactttttttatccttgaaatcttgcattatagcatctttttcatcatttttcatacgtccatgtacaagagcaaccttagcaattccttcaaaataagtagataattcagcatgcaatgctactgcattctttaaatctaaagcttctgactcttcaatcaacggtgaaatgacatacacttgagcatctttttgcaattcaccttttacccattccaacacagtacctagctgctcgtgtttcacccagcgtgtaataataggtttacgaccggcaggtaattcatcaataatagaaacatccatttctccaaaagctgtgattgctagagttcggggaattggggtggctgtcatcattaaaacatcaggattttctcccttttcacggaaaattctacgctgtttaacaccaaaacgatgttgctcgtctgtaattacaagccccagtttatggtactgtaccgagtcctggataagagcatgagttcctacaatcatatcaaccgagccatttgcaatagctgctaaaaccgtacgcttaacagctgctttcatacccgaagttaatatagcgattgataaatctggaaataactcttgcagactaatgtagtgttgttcagctaggatttccgttggaaccatcaaagccgattgaaaacctgctgtataagctgcatacattgatagaccagcaatgactgtctttcctgatcctacatctccttgcaataaacgattcatatgagctcccgatgacatatcagataatatttcatctaaagagcgcttttgagcattcgttagaataaaaggtaaagaggaaatttttgtctccatagcatgtttactataaagaataggcaaaccatttgtttcagatttattttcggatttcaaaacttgaaggttcatttgaaagtaaaataattcttcaaatttaatccgacggagcgcttgcttatactctgtgatatcttttgggaaatgcatagctaaacaagcctgactacgacccatcaatcggtatttttccaataaagtagctggtaaattttccttcaattccaaatgcgcactgatttcaaaagctgacttaatagctttaatcaaagtagactgtgaaattccctgagctacgcgataaacaggttgcatgtcatcttcaacttgagctaaaaccttcatcccagtaatagctgatttagttgcatcccatttaccaaagacagctacctcttgaccaagttctattttatcagctaaatagggttgattaaaaaaactaacatttaagacagcttccccttgacgcaacttaaaacttaaacggttacgtttaaaaccataatattgtacattagctggagtaacgactaggcctgtaatgactgctttttcaccatccactaaatcaaaaacagattttgatttaaaatcttcatagcgaaacggataataaagaagtaaatcttctactgtataaatatctaatttctgaaatttttctgctgattttggtccaaatcccttaagattagaaattggtgattgtaatagcataagattctccttctaatatcttttattatactaaaagatcaccaaaaaggcgcctcaagagcgcctttattatgtctaattatttatggccaataacataagttaattgtgcagcttgtgctgaactaaaagtacggtaagagacaataccacgtcccattgcattagattctgaaataagaactgaaccatcttttttaacttcttcaacaatagctacgtgaccgtaagtgccatcagcaccagcttgtcctggtgaaaatgatacagcatagcctacttttggtgaatgtgttgtttcaaaaccagccttatgttgccaatctccaccattacccataaatggatcaaatgtataacctaactctttagcgcggttaaagacataccatgtacattcaccccatggataagttgatgcaatatagctagctgtgttaactgctgttgataagctaaaaccacttggtaaatctgctaaacttgctgtcgataaagctttcaaggcagcaggaatttctggtgtccctccatgttgatcaatccagcggtctaaatcttccataatctgggcacgacgtttaccagttccagagttatctgtataataaacaccaccctcagtaactgtattaagttgtccagaagataatttctgtgctttcaaatcttggatttcaaagctagagttgttgtttttaataattgtattttttgtcaacaacataattgcttcttcatcattataagcactagcatggctagagtcatgatcaaaggcaccataaccaaacatattagcacctggcatcttagccactccttgagttcccaatgaactttcaaggacagcaatagctacaatagcacggacatctaaaccactatctttttcccattgtaataacttagcaccattgatacgattagaatcatattgaatccctaaagattttaagtacccatctaattgttcagctttgataccgtaacgatgtgacaataaatagtgagagtaggcatcctgaccagaccagtgttctacgtagaatggcgttgctgtcactggtgaaatcggtgttgataataagttatcatcaaaggataaagcaggaacagaagcattctgatttgtctgaacactttctatctgagacggagcgggagttattttaggctctactaatggtaaggtaggctcaggttttaattcagtctttgttgattgacctggcttactgtctgcttgactactgtttgtagtattagtgctaggagtagatgctgttgaagcagaatcagatgttttagcatcttcgttggaagaagattgatgtgatgaacttgatgatgattcattgcttgatgatgtctctgtcgtaccaatctctgttttttctgttgagatacttccttcggctgaaggtgaagcagtttctgaatctgtaggttgtgttttttcctgtttctctgcttcagaagaactttctgttgatgctgttgccattgtcaggcttgtttctggattaatagtttctgctaaggtcactaaaggtgatgatagcgataagactaaagtggataacaacaaagttgccattactttttgttttgacatatactaatgatttccttctataaaaattgtcactgattagtttaacatatttttaaattttttaaaacagttaactactgtgtcatttgtttttaataatatctcggaatacgatcgcttaaaagacaaagtacttcataattaatcgtctgtcttttttgagcgacgtccgtagttgtaatgttacaactaccttgttgaccaatcaaggttactttagttccgatagtatatttttgaggtaaacggatagtcatttgatccatcgagacacgcccaataatttcacaaagttctccatttactataactgaaaatccttgcatatctcgtgtccatccatcagcgtagccaatcggtactgttccaacaaattcgtctccagtaacttgataggttgcgccatagccaacttgagaaccatcgtgtagttgtttaacatgtactagctcagactctaaacttaaagcagggtttatagggtaaggtaagtctaaatcagttccacttggatttaagccgtacataacaacacccaatctaacggcattaaaaattgtctcactatgccaaaggcttgtagcagaattactagcatgaacaaggtccggacaattatctaatcctgaaataaagtctttaaaaaaagtaagttgttgattgaatttacagttatcggcttcatcagctgttgcaaaatgggtgaaaatccccttgacagaggcaccactttcccccaattcagaaattagcttatttccttcatctaactggcgaacacctatacgtcccattccactatcaactttgatatgtacttctagaccagataaatctactgctgatgtctgacataaacgtaaccactccaagctagcaactgttagagtaatattttcatttttggctagtataacctgctcaggcataacaacacctaataccaatatcatttttacaattcctgcttgacgtagctcaatagcctcatctaaattggatacgcaaaaaccatctacaatagactcaatgtattttgaaacttcaacagcaccatgcccataagcattagccttaactacagcaaatgtttttttatcacttggaatgtgctcttgtacagatttaacgttatttgcaatcgcctctaaatctatcaaggctctggttggtctatgataacttgaaatcatttttcttcctccaaaataacactagcttgtgcataattaccactatgagatattgaaacaaaagattttccattaaacggttcttttgtaatcaaaggcgctcctttatcatccgataaaatttcgatatcatgaaaattaactttcccaattcctgttccaagtgctttgctataagcctcttttgctgcccatcgccctgttaaaaaagacatctgacgcttgggattggaaattcctttaaaaagaagcaattcttgttcggtcaaaacgcgttctgcaaaacgttgattacgctcatatgctttagtaatcgcctctatctcttgtaaatcaattccgtgtccaacaatcatgtgtaactcctataagttcgatacttacaaactattgtaaatatccctaattagcatttctgttttatcccaacctagacatggatctgtgatagacttaccaaaaacatctggtttatcttgtcttccatcttctaaataagattctatcaaaaaaccacgaacatagtttctaattttagtatgccactgtcggtctgcaagtactgatttcacaatgcgaatttgttctaaaaattgcttacctgaattgtcatgatttgtatcaacaacaataaagggattttgcaaatcagtctcttcataatgagtaatagtttctaaaaggttttcataatgataattagggatacttcgatagtcggcattatgatatcctctcaaaataacatgtgacagcaaattaccatctgttctaacttgcttattttgatagaataattcctgttgattttgtgctgcatagaccgcattaaacatgactcttaaattaccagacgttggatttttcatacctactggtgcatctatacctgaagatataaaacggtgtccctgatcttccactgaacgcgcaccaatagcatagtaagaaactaaatcatccatcactgataacatctctggataaagtaattcatcagctgtcaggagtccagtctctcgaatgatgtcatagtgcatcttacgtgcttgaaaaaaaactcctagtttgtcagaatggtgaactaagcctttataaccatcaccattcgttcttggcttagcggtataaactctcataaccaaaaacattttatctttaaaggcagcttccaatttagctaaacgctttgcataagttagcaccgcctttggattatccgcagaacaaggacctactattactagaaaccgctgatcctcaccttttatgatattttttaactcttcttctttggctaattttttttggctaacttctagatctaagctagttttctgcttcaatatttcaatattaattttatcacttaactgatgaaatcccatgttttttcctaatacaacctaagtctattaataagctctgctatacaatatagtcgtcatactattagacaagtaatgataaaacagtcttctcagactgttttatttttattttaaaatcattgttattgtaaacatctcagaccatgacaatttttaaacttcatgccagagccacaaggacatttatcattacgtttaatcccttggtattctggtgattcattattcataggtacatgttgtgccgagatattttgctctgctgttgtcgtagcatgttgagaagcacgttcacgctcttgttcatgaatttgagctttcatcaatgtacgtgtcacatcaaactcaatcgaaccaatcatatcttggaacatacggaaaccttctgattgatactcaacgattgggttattttgagcataaccacgaagtccaacggagttacgtaattgatctaaggcatcaatatgctctgtccattgattatccactaccatcaagattaagactttttggaattcgataatagcttctggatcttttaatttagcaatttgttgctcataaacagctaaggcacgttcataaagaagttctttaatttcagcctcttttagaccacgaagttctgaaactgtgatagcttcttcatctaataacgccgatcttgcaaaattaacaatagcttctgctgcagtatttttatcgcttctgctatgtgcatcaactgctcttttaatcgtacgtttaatcatccctttgagctctggtcctaaatcacgctcagcagtaatcacttctctacggttagcataaataatctcacgttgttcacgcataacatcatcgtattgcaagacttgtttacgtgtgtcatagttattaccttcaacgcggcgttgagctgattcaacttgtcgtgtcaacatttttgatttaataactgtatcatcttcagctaaattcattcgctcaagaaccactttaatacgatctgtaccaaagcgacgcatcaaatcatcttctaacgaaagatagaattgtgattcacctggatctccttgacgacccgaacgaccacgaagctggttatcaatacgacggctttcatgacgctctgtaccaataacacataaaccaccaagttcacgaaccccttcaccaagcttgatatcagtaccacgaccagccatgttggttgcgattgtaacagcaccacgttgcccagcattcataatgatttgagcttctttaaagtgatttttagcattcaaaacttcatgtggtactccagcagcaactaattttctagaaattaagtctgacgtttcaacagctactgtaccaaccagtacaggttgtccttgttcataacgttctttgacatctgctaccaccgctctaaatttagagtcaagagttggataaagtagatctgaatgatctatacgttgaacaggacgatttgttgggataggaataacgcgcatattataaatttcacgaaactcttcttcctcagtcttaccagtaccagtcattcctgctaatttatggtacatacggaacatattttggtaagtaattgaagcgctcgtttttgattcttcttggattggcactgactcttttgcttcaatagcttggtgtaagccatctgagaaacgacgtccttccatcgtacgaccggtaaattggtccacaattaaaatctcttgttcttcactaaccacataatcaatatttaacaacataatatagttagctcgaagagcgttatcaatgtagtgagttaaggcaacattttcgagatcatacaagttatttagatggaaatagttttcagccttgtcaatacctgtatctgataaaccaattgtttttgttggaacatcaatgatataatcatcgctattaagcgtttttacaaacatgtccgcacgtgtatacagttggttcatctcagagcttacaggacctgaaacaatcaatggcgtcctagcttcatcgattaatacagagtcaacctcatcaaccaaagcatagttgagtgggcgttgcaccatatcttcttggcgaacaaccatattgtctcgaaggtagtcaaatccgacttctgcgttagttgagtatgtgatatcacaattgtaagcttcgcgtttttcaaatggtgacttagctgctaagttaatccctacagataatccaagccaactataaacctcacccatttcggtcgcatcacgtgttgataaatactcattaacagtaataacatgaacacctaatcctgagatagcatttagataaacaggcattgtcgctgttaaagtttttccctcaccagtacgcatttctggaatatcaccatggtgaagaacgataccacccataatttggacgtggtatgggtataaacctaatacacgtttagaagcttcacgaactaccgcaaacgcttccggtaacaattgatctaaagtttcaccattttgataacgttctttaaattctggagtttttgcttgtaaagcttcatctgataacgcagccatatgatctgcgtaagagtcaactttcttagctattttatctaatttttttaattcacccttgtcattttcaataacagtgcgtagaatatttgccattctaattcctttcgatactcttatcaccacattttaccataaataatgttgtctttcaataaatggtcgttttaatcgagattaaaaagagtggtatccccactctcattattttttaacatgacttgctataatttctaactgtccatcaatatcccatttgacaacatcatttggcaagataaagtggtcaccttttttaagtgtataaactttgttatctactgtaatgtgacccgctccgtctaagacactaaccaaaaggtagggtgcaaattgtttaaagttggtaacaccagaaatttcccatttataaactgtaaagaaatcatttgaaactaataaagttgaagatagatgttttaacttcatattggcaggaacagtattggcaggtttaccaatcgtgagaacatctattgattgttcaatgtgtaaatcacgtaattttcctgaagcatctggacgatcaaaatcataaacacgataagtagtatcactagattgctgtgtttctaaaattaatatccctttacctatagcatgcattgtcccacttggaacgtagtaaaaatcccctgatttaacaggaattcgggttaaaagatgttcccaatctccagattcaatcatttggcgaagttcttctttagttttagcattatgaccatagataatttcagatccttcatcagcagaaataatataccaacattctgttttaccaagttcaccttcatgtttaagagcataagcatcatccggatgaacctgtacactaagccagtcattagcatctaagattttagttagtaaaggaaagacagtatcatcagggttgccaaataagcttttttcaccttgatacagcttatctaaaaaacaacctttaaagcgaccattcttaactcttgagacaccgttaggatgagctgaaatagcccaatattctcctgttgtttcacttggaatatcatagccaaattcatcccttaactttgttccaccccagattttatcgtgcatgcttgcttctaaaaataatggttccgacataagaatcccctatcttttgtaaaattcaagcctattatagcattttatccatcatatcgcttactttttttaatcttttatttgctaactaaactaagtagtggcttaagggttttattaaccttttgatattttctttgctaaagcaaaatttcctaacgttgcagaaccattttcttctatagctggtgtcacaatataatcagacaaatcgggaactggtaaatacccatttaataaagttgcaaatgtctggcgaacacgtcttaacatgtgctcttgtgccatgacgcctccaccaaatacaatgacttgtggacgatataatacagttgcttgtattgcagcctgagcaatataataggcttgaacatcccaaaccattgaattttcttcaatcaattcaccacgaataccagtcctagcttctagagttggaccagatgccaaaccttctaaacagctattatgaaacggacagatacctttaaaatcatttgcttggtcctgcggatgcatcgccatataagtatgacctgcttcagtatgaccagttcctcctataaattcacccttttgtatagctcctgcaccaattcccgtaccaatggtgtaataaacaagtgaatcaatattgttacgagctataacttcaccataggcagagctattaacatctgttgtgaaataaaatggaacattgaaatctttagaaattaagccgagtaaatcaacattagcccaatgcaactttggggtcgttgtgatataaccgtatgtctttgattttttatcaatatcaatgggaccaaaagaaccaatagcaactgcctctaacttcttttcaaatcttttaaagaaatcaacagtctttttaatcgtttcttgaggcgtcgttgttggaaattgcattttttctacaacttttaattcctcatcaccaactgcacaaacaaactttgtcccacctgcttcaatactaccatataactttgtcatcttttttcctatctataatctctatctcaaagacaaaggttgggataattatcccaacctttaatcctcacttaacatcaataatcatgtcacctgtagtaacaacaccctcttttaccaatggtacaacatcagcaaaatcagctgtattagtcacaataatcatagctgtattatccagacctgcttctgcaatcttggctgaatcaaaggtgccaagaatatcaccttttttcactttttggtctgccttgactttagaagtaaaccctgtgccattcatggtgacagtatcaatacctatatgaatcaaaatttctgcacctttatctgatttgataccgtaagcatgacctgtttcaaaagcaatttggacaaaaccatcaacaggtgagtaaattgtattacctcttggtttaatagcaaggccatctcccataatacctgatgaaaaaactgggtcacttactgtatcaagagcaataacctgtccatcaagagggctaacaatcgtttctgcccttaattggctagtttgagtaattgttggatcgtcatctgtttcttcaaccaaaggactaacttcagctactgctttttcatctttatcttcatatccaaacatataagttaatacaaaagccaaagacgtagttccaattaccataataaggtacttaacaatttgaccatttaaataaagtaatgttcctgggataatggtaataccaaaaccagttcctgctaatttcaatattgaagctaaccagccacctgctgctcctgcaattaatcccataataaatggcttaccaaaacgtaagtttactccaaatatagccggttctgtaataccaagtccagctgaaagcgctgccggaaaagcaagggcttttaattttttattttttgttttaacaccaactgccaaagtggcacctgcttgtgctgtcatagcagctgtaataatagcattaaatggatctttcccatcagcagcaattaactgagcttcaagtaaattaaagatatgatgaacacctgtaacaacgattatctgatgaacaccacctaaaataagacctgacaggccaagaggtaaattaaggacaaattttgtccctgctaaaacatagttttcaactgaatggaaaataggaccaatgacaaaaagtgctaaaattgacataactgtaaaagttaggaacggcactaatagtaaatcaagaacatctgggattttcttatgcaaccatttttcaagtttagcaccaagtaaacctacaaagaatgccggcaatactgaattttgataaccaactactggaataaaaccgaaaaattttatgggatgggcatcacctgaggccactgcccaagcgtttggaagggcagagttgaccatcatcaatcctaatacgagaccgataacaggatttccaccaaaaactctaaaagctgaccaagaaatcaaggcaggaaaaaaagcaaaggccgtgtcagtcaaaacgacagtataggtataaaaattagaacttgaaaatgcttttgaagtcgtcccaaataaagctaaaactgtatcattattaatcgcaccgcgaatccccataaataaaccagtagcaacaatggctggcaacaatggaacaaaaacatcaccgaaagtacgaatagctcgttggaaagcattcccttgtttagctgcttctgccttttgatcagaggttgacgaagttggcaaaccttgagccactacttcatcataaatcttattaacagtaccagttccaaaaataatttgatattgacctgaattgaaaaatgctccctgaactttttcgatattttcaacagtatttttatcaatgactgtctcatcttttaccataacgcgaagacgagtggcacagtgtgctacgctacgcacattactagcaccaccaatcgcattaatgacttgtttagcaatttctgtatttgaagccatctataaatctcctttgatattttgaaagcgtttcattttatttactctaatattctagcacgtctcataaatatatgtcaagcgtttgacataaaataatatttttcgatataaagtgttgatttcaaaagagaaaacgtttactatatagttattagatattaagacagtcaaggagtatcaaatgaatttacccactgaaatccgctatcgtccttatgatgaatggactgaagaagataaggaaaatattgtaaagaatgtctcaaaatccccttggagagcaacttatcacttagaagctaaaacagggcttttaaatgacccaaatggcttctcttactttaatggaaaattccatcttttttaccaaaattggccctttggagctgcacatggtttaaaacaatgggtacatacagaatcagatgatttagttcatttcaaagaaacaggaatcaagcttaaacctgaccatgtcaatgatagccatggtgcatactccggttctgcattagccattgacgataagctttttcttttttatactggtaatgtccgtgacatgaaatggaaccgtgacccccgccaaattggagcatggatgacaaatgatggcaagattacaaaatttgataaagtccttatttcacaaccaaatgatgtcactgagcattttcgtgaccctcagattttcaattatgataatcaattctatgctgttatcggggcgcaaaatagtaaaaaatgcggattcattaaattatataaagcacttaataatgacatccatcattgggagtttgtgggagatttagattttggtggtactggatctgagtatatgattgaatgtccaaatattatttttgtcaaaggaaaacctgtattactttatagtcctcaaggactagataaaaacgaattggactaccaaaacatttatccaaatacctacaaaatcggacaatatttcgatgctaactcatctaagatagttgaaccatcccctatctataatttagattatggttttgaagcctatgctactcaaggatttaacacttctgatggtcgtgcctttatcgtgagttggataggcttgccagatattgattatcctagcgatcaatttgattatcaaggagctatgagtttagttaaagagttaagcataaaaaatgggaacctttatcaatatcccgttcctgctatgaaaaatcttcgtcaacatcaagcagaatttaaaacacaacttcaaactaacaacacctatgaattagaattactggttcctagaaatgatctttcttcatttgttctctttgctaatccgaaaggacaaggactatccattactattgatactgtaaaggggaaagttatcattgaccgctcacaagccggacagcagtacgccacagaatttggtactagtcgccagtgtgacattccaaaagatgctactagtatcaatatttttatcgataagtccatctttgaaatctttataaataaaggagaaaaagtatttacgggacgagtctttccagatgcagaacaatcagggattcaactaaaagaagggcacgttcatggtaaatattttgaattaaaatattaatatggttgcaaaattaacagatgttgctgcacttgccggtgttagcccaacgactgtatcacgcgttattaacaaaaaaggctatttatctcaaaaaacagtcaccaaagtcaatgaagccatgagaacccttggttataaacctaataatttagcacgtagcttacagggaaagtccgctaaattaattggactcattttccccaacatccgtaacattttttacgctgaattaattgaacaccttgaaattgagttgtttaagcatggttataaaactatcttatgtaatagtgaaaaggatcctatcaaagaaaaagaatacctcgaaatgctaggagcaaatcaagtagacggtatcatttcaagtagtcacaacctaggaattgatgattacgagaaagttgaggctcccatagtagcattcgatagaaatttagctccacacatccctatcgtctcatctgataatttctttggaggaaaaatggctgctcaaacccttaaaaaacatggctgtcaaaagatgattatgattacagggaatgataattcagattctcctactggacttaggcggctaggtttttcctatgaatcaaaggaatccaaagttatcacagtcacaaatgggctatctaacatgagacgtgagatggaattaaaatcaattatctcgactcacaaaccagatggtatttttacatcagacgacttaactgctttattagtaatcaaacttatcagccaactagggttgtccattccagaagatatcaaagtgattggatatgatggtacaagtttcattcaagattacgtcccacatctaaccactattaaacaacctattcgagaaattgcgcaattgatggttgagatactcctagctaagattgaggggcaaaagacaaataaggattatattttaccagtcagtctcatccctggtagtagcgtttaggaaatcatatttatgaaataatttttagtaccgatagttatttttcaaagcaaattaaaaatgtggaagaagattcttccacatttttaattttcatttgttataaattgacttaataaaccattgacaaattttgctgacgtctcatctgaatattttttagcaatctcgataatctcatttagagctacacgatcaggcgtttcatcaaaatatttaatttcatagaggcctaagcgtaagagagatttatcaaccaatgttagacgttctaagctccatcctgattttaagtgactagaaatcaaagtatctaattcatctttgtgatctacaacaccattaacaagattaagtaaaaagattggaacctctaaaactttgtcttcagatactgttttatcataaccataagcaaagtgagccgcatcaataaactctccaccagtttctaagctaaatagtgtttgaaaagcacgttcacgtaaatcacgtcttgaatctttaaatacactagtcatctaagaaatcctcatcaaacaatgacttcaagtctggttttggtgttttctctggaacaataccttcaacatggatattgaccgaagaaatttttacttctgccatgtcatatacagctgttttgacagcttgttgaatagcaattgaaactgctggtacatttacaccatactgcaagtaaacataaatatctgcagctactgtatcatcttcttcatttttaaggtagacacctctacctagagatttcttactaaggctatccgttaccgctttgttacgtaacgaatgaacaccatcaactttagttgcagcaatacctgtaattacctcaagtacacgtggtgaaatgacaatttctccaagattttcagttgtcatagcttatcctttcttttagtgtttactaaggtttttccttaatagagtaaattcatcatgaatctacttaacacttttttgagagtcattaggcgcgtgaaacgtaagttccttctgctgtattgattactaacttttgtccagcttcaataaaatctggaacgttaacaacaagtcctgtttccatagttgcaggttttcctgaaccagttacagtagcacctttgattgatggttgagtttcagcaactgtcaattcaacagttgttggaatttgaacaccaataacttctgttccatagaattgaatttttacttctgagttttcaagaatgtagagtaattcattttcaatgttaacagttggaatttcatattgatcgtaagtttcattattcatgaagtaagctgtatcatccatcttataaaggtattgagcaggtacagtttcaataatagcttgctcaaatttttcttcaggacggtaacttgtatcaaaagttgaaccagtacgaacatcacgcaatttcatacgcatgattgtgttacctttacctggtttgtggtggctagcttcaagaacacggattaatttcccatcagccgtttcaaaagtcatgcctgctttaagcttacttgcttcaatcatttattaatacctctttgtaaaaattatttatcaactcattttatcacaaataacctgctttctcaaatagtttattgatttggtatgtgtctgatttcttgataaataaataaaatcaccaagagggcgtaaataagactgaagcacttgacactttcctcttacttcagttttgataacagttttaatattataccgatatcttgactaagattgaaatactgtttaggtgtttttagtgactttttagtaaattttgataaaggtagtaaactatagttgtcttattgaaacagataaaataaatcacctacggagctattcgtatgaaaatgtagttattctcgatataagttttagatacgaacttaatttgctctattgaagctggtaaaggaaatcggggtggtgttagtggacgtgcgctaagcattggtactgagcttggtgataccaatcttgcttactacatcaggtagctctctgttttagtgccatatgcaattggaataagagctgtcattggtattgaaggagccctagtccactgatcattgaattactaatttaggaggtggaatgatgaattttaatatgtctcattatagaaagttacaactatgtcgttttctaatcgtacagatacctgcgctggctttattagctattcttttatacgggattttcctaaagtacagtctattttcaaaagtattttttcttatcttttaggggttgaaatagttatcaattttgggaagtacataccagtttacaccaaccacaatttgtcgagtaaagaattgtaatttagtaaagcccttttcgttttcttctgataagtgtatcatgacatctatcaatagcatattcacactagtagcatattgatttgtttttgagtagaatttactttttagattatttctattctacactagtctttccctttggaagattctttccctctgtatttttccatttttcaatgagacgagaaactctttcttcctcctcatcatggtaaccttcaaaaacaacctcatcaatatcttcttgattaaaatagtaaacttgttcaagatttaaaccctcaggaaaaattccacctaggtaatcaaaataaacttcttgtccttcttgctcaacaattgcacctctatttacaataactaatttttgattgccatcaataagatagacaacactccctactggtaataacatacttcagttctccccaatataataatttttcccatttaacgatggttgaaactcaatgaactttataaaaaataaactgtttgaaaaaataaatccaaataaaaataagtttgaaaagttttcgtcccacaatgccattccccatagaacgatataagaaattatgattgataatattactataaatgggctcttccgtttttgattattatatttcaaaaaactagatttatatttggaaagatctaatgctttatttctctgatttagctaaaacaagactaaatatgctcaataaaataaaaagataaaaatgttctaatattaaatgcgatcttgttaagtatgcaatatttatattttttggaaaaattgagatatgaactaaataaaataaaaataaaattgtaaaagtttttaaagataaaggcgactttttttgtttactaaaaaattcttataatccgcagtcacatcataaatttgatatttttctactctttctggaaaaatacctataaaataatcttttatatcactaggattggcataatcaataatgtaataacgtccactaatactaactagataatatctaaaattaagttttgctacaagctcaacccgtctataactttttattcccattagttcacgtacctaactatttatttttgtaaaatgtttatcaatattgttaattacatttcctgtactacttataacatttctaaatgatttagaattattatacaatgcttttacaccaatcgaagcaactgctcctatcacaggtgcaatttcagtaccaattgctaatatcttattcaatcacaactccttttatatattggttccactattactatttttttctaattcgatcaataccttttttcttttataaggtctatattccaatattaatattagtacagacacaaaaagtattcccaaaataatgaataaattgaaatctaaaacttgtagaaataatttaaataaaagtaggatactaaaacttaatatgaaagagattgaaattattaatatattatgtactttagcatctttaataaatttttttaactgtccagggaaaatttctagctcttcataatcattttttcttctcatcaattttactgtaaatcctgaaactagtatcaataaagataaatatacaatagaaaataaaattgaaaaatttgaaatttctagattttcacttatactttgaattatttttccaataatagttgaaataataggagttagtagcattatacctgtgctattttttttagattagatttatataattttttcgttttcatatcataataaacagcattatcatgaaaccatcctaaattaataagattatttgtttctatttccgttttcaaatcttgctccttaattatataaagtacctaaactattattagctgaaatggatttaccaatatttttgatagtttcttgtccataattgatgatatcatctttatagttatcatacacccaatcaaatgccatattagcataaactggatttacatctattgaggtcagcaacaatatcttttctcttttttgtaaattatttttgcaattcgagattcccagcagtactaattttagatgttgataatagatggatcagctattctattatcaacatctaaaactttctgtgaaaaatcattaggaataatgactattaactggtgatcaccttttttaggccattttcagtaatcccatgactaacaattgaccaattttgagaattatctcgttcaatatatttaacataactggcccttagcttaaacgataaaaccttcaaggaagataggcatatactctatcttcctctttactcttccatccctagtgttacctctggaacatcatgttgaacataagcaactccttttgcttccataagttcaatagcaaatgggtgtgggcgataattagctttataagtaattttcttaaccccggcttgcaagagcgccttggtgcaattgatacaaggaaaatgcgtcacataaatttctgtattattagtagaaataccttctttagcacactgaataagggcattcatctcagcatgaacagtcctaatacagtgaccatcttccatataatgtcccacttcgttacagttatctgtctcagagactcctccgttataacctgtagcaatgatgcgattatttttgactaaaacagctccaacaaaagcacggtcacaggtagaacgtttagaaatcaactctgcatttgccataaaataatcttcccaagaaagtctattcattctattttcctttaaagtacaattaattctttaggtgcagatgtcaatacttcgcaacctgtttccgttattaataaatcatcttcaatacgaacaccgtatttattatcgagatatattcctggctcgtcagtcactaccatcccagatgcaatcactccctctgacttaccaaaataaggaatttcatgaacatcaagccccataccatgccctataccgtgggtaaaatgattaccgtatccagaattttcaatgacttgtcgcgccaagtaatcataatcacaacgcttcattcctgattttacattaccaataatagcttgattacttttcaaaacgatatcgtaaatctcgcgttcctgatcagtgacatgaccgatatgaatcgtacgtgtcatatcactaacatagtgctgatagtaacaaccaaaatctaaagtcagagtttctcccgattgaatagtcttctgactcgcaaccccatgtggcatcgctgatcgatatccagatgctacaataaaatcaaatgaaggaccagttgctcctaattctctcatgcgaaagtctaaaaaattagcaacttgcaattcagttgttcgatcaggctttataaaatccaacacatctaaaaaagcttggtccgaaatacgacaggcttgacggatgatcgcaagttatgttacatctttaatcatacgtaacttttcaacaacagatggagcttctatcaagcgataatcttcaaaaacttccaccatatgtttgtacatatgataagaaatatcagtttcaaaaccaatcgctatcaatgcgtcatcgcgaataattttcaaaatagccgcaagtggttctctgctaatgataatatcaaactctcttacagtattctttgctatcaaggcatatcgtgaatctgtaacaaaaatccggtgttttggactaatgagtaccgttgcattagttcctgaaaaaccagtcaaataaaaaatatttgttaaatttgttattaagagtgcgtcacatgataattgtgaaattgctgtttgacatctagttagacgttgttcaaaacccataagaaacctcgctattctaaccttaattaggttaattttatcatcttttaaaacatttagctataagaaaagcaactcatttcagttgcttttactttactattcttttatattaagagcttcttttaatgctttaacttgcatctcagcataagcttctggatttgtcttagctaatgtctttatctccatagctttcactgggtttacttttgcttgcgaagtcatttgttcttttagtttagccgcagccgattctaagtgttcggactgctctttagtcaaaactagccaagtttttcgtggtattttagcaactgatttctgagaaatcaattctccattttcacctgcaaagccataaagtagtttcgaaagactatctttccacacataacgtttagtctttgttgttactgtggcttttttcacatcagctaattggtagctagcagattttttcacagcacttgtcacttcttttgtatttggaacaaagtgagcttttgcttctttttgatttaaatctgttcgataaactaaaacattattactcgaatgagtaccaatctctttataaatcatgagaccaaatggagccttactatcacccgcactataaatctcacgtgtctttgtcttagtttcaatagtcatacctgtatgattaataaagtgatccgttaacatccaaactgaggcaaacaacaaagctaatgagagaagacctagaatataccgtagagcttttggacgaatcaacatccatgtgacaaatgtcaaaatagttgccagtgcaataatcaaaataatcatgctatacctccttttccgtctcaataattttcccttttctcaggaaaagagataccagtaaaccaagaaccgcaaatacaaaaccaatggcaaaagaaacatggaagccatcaagactagcattcaacatctgatttgcatattttaaaggattcattgttagcaaatcttttgatggtttattgttggtgataatattttgagcaacacttgaaagcaatgcaactacaactgctgaagcaatttgacgagcagtattattagctgctgttccatgtgcggcctcatgtggtggaagtgcgctcatcgcacttgctgtcaatggcatcataaccatagcaataccaaacatacgtactgcatataagagggtaataaaatgatctggtgttgtagtcgttaagaaaacaaaaggtaacgtcgctacacctagtatggtaaaaccaatcatagccatacgtcttgcaccaactttatcatatacagctccagaaattggactaactatccccatcatcaaggcacctggtaataaagctaaaccagaatcaagtgcagagagaccatgaacattttgcaagtaaagcggtagcatcatttcaacacccatcatcgccatcattgaaagtgcaatagctgctgttgttactgagaattgtttatttttgaaaacacggatatctaagaacggtgtttctagttttaattgacgatgaatgaataaggcgataaaaataataccaaccataataggagaaataacatatccaatatctccccatccataagttgccacatttgtgaagccccacaaaaagctaccaaagccaattattgaaaggataagggaaggcacttccaatttaactgacttattatcaaccacatcttttagaacaaagggggataaaattgtagtgaccgttaaaattagtaaaggaagaaggaaaattgcacgccatgttaaatcatgccctgcaaaatgaaattcttgttttaaaatccaccctgctaatgtaggcccaatagctggggcaagaccaaccaccaaaccattaagtcccatagcggcaccacgctgctctggaggaaaaacattcaccataacaacctgcatcaaaggcatagaaatccctacagaaatcgcttgaataatacgtcctactaaaaaaaggttccagttagatgtaggtgctaacgtcgtcattaacagtccaataagtaaaacaacgtaggatgtcacatacaaccattttgttgaaaaacgtgtcgctaaataagctgaaacaggaatcataatcccattcgctaataaaaaccatgttgttgcttgttgagccgttgacaacgaaatgttaaagctattcatcaaagttgggatagccgttcccaaacttgtctgatttaatacccctgcaaatgtagcaatcaacaataaggtgatcatggctgtacgattatatggtttgccatgaatatcatgttttgcttttgtagtcattttatctccaatctctatttctgattttaactaatatcttttaagaataacaaataggtcttataaggttattttttgattttttaatcaagaaataatattattttctgaaaaaatcattattttagttatcgtgagaactattttataatagctaaattttattgtcaagaaaaagattctcatagaaactatttttttcaaaacatcattatttcctttttttaaaatatctccccactatttttcctaataaagcgttctccatttaatgacttctacgcaatgttagcttacaaaaaggaactgagtaatattactcagctcccaataaactatcttgctaacttctcttttaaataatatcctgtataggatttaggattttcagcaacttcttctggtgttccgatagctacaatttgtccgccaccaatacctccttcagggccaagatcaataatgtggtcagcagttttaataacatcaaggttatgctcaataacaagcactgtattaccatcatctacaaaacgatccaaaaccttaagtaaacgagcaatatcatctgcatgaagccccgttgttggttcgtctaatatgtaaagactcttacctgtcgaacgcttatgtaattcacttgccagcttcattcgctgagcttctcctcctgataaggttgtagctggttgccccaaagtgacatatcccaaaccaacatccttaatagtctgtaacttacgagcaattttaggaatagctgcaaaaaatgtaactgcatcattcactgtcatatcaagaatttgtgcaatatttttttctttgtaatgtacttccagagtctcactattatagcgcgtgccgtggcatacttcacaaggaacgtagacatctggtaaaaaatgcatctcaattttgatgataccatcgccagaacaagactcacaacgtccacctttgacgttaaatgagaagcgtccttttttataacctcgaatctttgcctcattagtttgagcaaaaagatcacgaatatcatcaaaaacacctgtataggttgcgggattagaacgtggagtccgaccaattggactttgatcaatatcaatcaatcgatcaacatattcaatgccttctaaagaaacatatttacctggtttatctgagttacggttaagcttctgcgcaacagcttttttcaaaatactattaattaaggttgattttccagaacctgagacaccagttacggcaataaatttaccgagagggaacttgacatctaaattttgtaggttgttttctgccgcacctttgatttctaaaaagcgaccattacctactcttcgttcagatggcacaggaatcactttcttacctgacaaatattgtcctgtaatagatttagtatttttagctacttgcttcggtgtaccagaggccacaatctcaccaccaaacgcaccagcgccaggtcccacatcgattaaccaatcagctgccatcattgtatcttcatcatgttcaacaacaataagcgtattacccaaatcacgcattttcttaagactatcaatcaaacggtcattgtctcgctgatgaagtccaatggacggctcatcaagtacataaaggacacctgataaattagacccaatttgagtagccaaacgaatacgttgactctcgcccccggaaagtgttcctgcagaacgtgacagatttaaataattaagtccaacattatttaagaaacttagacggtcatggatttctttgataattggtcgagcaattaattgttcatttgaagataaacgcaatgtttctaaaagttctaaatggtctgctatcgataaatctgagacttgcccaatattaagaccttcttctcccccaactcttacgcaaagtgcttgatcattgagacgatagccatgacaagtgttacattttagctcgttcatatattctcgcataacattgcgtgtgtaatcgctattagtttcatggtaacgacgattaatattattgacaaccccttcaaaaggcaaatcaatatttctctcgcctccaaaatcgttaatataatggaaatggaactctcgttcgcctgaaccatatagggctaggtcctgctccgccttgcttaatttttcaaatggcgtatccatatcaacaccaaattgagtcatagcttgctctagcatcgttggataataatttgatgaaattggattccaaggaactaaggccccttctctaagggtcttacttctatctggaataaccaaatctatatctacttctaacttaattcctaagccatcacaggtcggacaagaaccaaagggagcattaaaagaaaaaaggcgtggctctaattcaggaacagtaaaaccacattcaggacaagaataatgttctgaaaacaataactcattgccatccattgtatcaataacgacataaccatccgacaaacgtagagccgcttcaacggaatcaaataagcgggaacgaatgccctctttattaattaatcgatctactacaatatcaatattgtgcatcttactttttgataattcaggcacctcagtaacatcgtgaatatcaccatcaatacgaacacgaacgtaaccatctttttgtattttctcaaatgttgatttgtgttgtcctttttttcgacgtataattggggctaaaatttgcatctttgttcgctctggaagcgctagtaccttatccacaatttgctctacagaagatgctgtgatggctccgtgaccattgatacaatatggggttccaacacgagcataaagcaaacgtaaataatcgttaatttctgttacagtcccaacagtagagcgaggattcttacttgttgttttctgatcaatagaaatagctggactaaggccatcaatagaatctacatcaggcttttccatatttcccaaaaattggcgcgcgtaagcagaaagactttcaacgtaacgacgttgtccttctgcatagatagtgtcaaaggccaaactagacttacctgatcctgatagtcccgtaacgacaactaacttgtctcgtggaatgtcgacacttatattttttaaattgtgagctcttgctcctcttatcattaatttatcttgcataatgttgtgcctcagcactcctttttgaatagtgttgacttattatatcaaattttaataaagtcagtatttttttagttttaaatttcatagaaaaaagagatgaactaatacgttcatactctttgttattatcttctttgttgtggtgccactggtgccattgagctttgaatattatatttacgttgtaaataaaagcgcaaaccaaacgatgctaaagcaataataaacaaaacaacctcaggaagtttaggattaatagttgcaggtagaagaggtactactgcaaataaggcaaaccaaactaacataactagtgccagtactgcgaaagatttaagccagcctggtctttcagattttggtttacccatatggcgataaatatagtaataagtaacgtacatggccgcaccaccaccaaaaccaagagttaaaattgaaataagccctgtattgacattagattgaccaaatagcaacattaaaccattcaaagcagttactaagccaagaaatagtaaggaagtatctaaccacatcaaccaaggattggtatttttttgtacagatactctagctttatcctcaggtcgctcagtgaatgaggctgcccaagtagttggtgctcctaagagtgagcgtgcggtaattccttttttctgattatctataatctctgggagatgttcttctaaaatagctttgatttctgcatctgattttccatcagctaaaagttgattagttgcaatatgaacaaactcttgattctttttagttaagtcttgtaaagtcatgtgaactccttgattaatatactattaaaaccattttttacgaataaaataaaatacaacaaatgaactcatcaaaaaggccaaaagaacaacatagataaagccatgtgcgagaccattcaaaggcatccaattattttgaaagttcatcccatacgccgaaaaaataaccgttggaatatccaatgtcatagttactagggctaaggttttcataatggtattctgattattaccgatgattgaagcagtcgtttctgtcatggcatttaagacattttcatagatatttgccatttcaatagcctgctgagtttcgatcaatgtatcttcaagcagatcttcatcttcaatgtatttttttaaactactggtactactggtcaattttttgacgattcgctcattaaattttaaagaggcctttagatagacaatagatttttccaattccatcatatcgatcaattgctcatttcgagttgcactctctagttgtgcttcaattttatcgctctgcctatcgatagtacgcaaagcctgtaagtataattcggcattgcgataaagcaattggaaaacaaaacgtgtcttcataaaggtataaaaatttttgacacgtcgtctataaaagtgatcaaacagcgtcaaatgttctaggcaagtagtaataacagcgttgtcagtaacgataatgcccataggaatagtcatataataacttttgttattgcgttcttcataggtaggaacgtcaacaataactaaagtataatcatcttcaaccgagatacgggaagtttcttccacatcgaggggagcacgtaaatcatcaatatcaataccaaattgatcagctacttgttcggattcttcctgggagggattaaccagatttatccaagcacctggctcgaatgtttcaatttctttaaattcaattgccgttgaaagaaacatttgcttcatggcgattcctcctttgttataaaaaatccataccttaatattatacaggaaaaccatttgttttgcacggttaatacggtggtatcctaaatttttctattatttgactcgtaaataccaataataatggtaaaaagaataaaaaaatagccgctagggctattttatattaatcttcatttacgtaaggcataagagccataacacgagcacgtttgattgctgttgttactttacgttggtttttagctgaagttcctgttacacgacgtggtaaaatttttccacgttctgaaacgaaacggctaagaagctctgtatctttgtaatcaacatattcaatcttgttagctgcgatataatcaacttttttacggcgtttgaatccgccacgacgttgttgagccatgtttatttctcctttatagttttaaattctgtccatctattatattagaatggtagatcatcatctgaaatatccattggatttgagttaccaaacggactctcatcacgactaaaattaggtgtttgttgagaagaagctgaataactattatttgacggagcattgttatagccaccgttattataagagttaggtgaaccaccttctcgtgtagcacgactttccaataattggaaactttccgcaacaacttctgttacatagacacgttgaccttgttggttttcataattacgcgtttggatacgacctgtaattccaaccaaagcacctttttttgcccagttagccaagttttcagcttgttggcgccaaataacacagttaataaaatcagcctcacgttcgccagattgatttttaaaattacgattaactgcaagtgaaaaagtggctaccgcttgattacttggtgtataacgaagttctgcatcacgggtcatgcgacctacaagtactacattattaatcataaactaccttcttagtctactttaacgatcatgtgacgaagaatgtcaccgttgatttttgaaagacgatcaaactcattaagagctactgcatcttcagcttcaacgttaacgatatggtaaagtccttcagtgaaatcttggatttcgtatgcaagacgacgtttttcccaatcttttgattcaacaacagttgcaccgttgtcagataagatagaatcaaaacgtgctaccaaagcgtttttagcttcttcttcaatgtttggacgaataatataaagaatttcgtatttagccattgatatgttcctccttttggtctaatgactcatgaatttttcatgagtaagtgaggttatgctcacaagatattattatagtagaaataagttaataatgcaaggtttttatgtttttatttccctgatatcatttaaagacattttttatttttctttattgaaatatgccttatatcaaacctatgtagccattttcttttactgacttatgttcaatccccattctataattcaattaaaaaataaaaaggcgaggtttacacctcaccttcaacatattatttaaagaattctttattggtttaagttttcgttggagaaaaattcagtgtctccgattttatatttttaaatattaaaatactatttagggagtccctcattatgttttattacctttggtaacaccaaaacatacacgaacttttattcatatgtgttaccattttacatctttcatattgagatatttgattagcaatacctccttgactaacaaaaattactaacacatctaggggtataccctagtttatatttgttcatgattacctcaagcaagcatgcgctaatggtaatgaactattaccacattgtctgtcttccttaaattatataaggacttatgtgtcaccgttactgtagcgacctacatctaaacctaacataagtgcccctccaactatttctaggaaatgaagaaaacttcaaatccttgtgactgtttgcaacatcaatgcattgataacaattttagtgtatcgccattcttatagcgacccatattaaaaattaacataagcgctacctccattaactaaagttagcttgcctaccaatctttcttttggagactagtctccattcttatacctagagatattgtaatagatcatggataacctccttgatttaaactttatctttataaattaattatagtgtaaacgcttccttaagtcaagaaaaaaatattgatgcaacatttttcttcatcattaagtacgatctagtcaacatacctctttgtcaaatcctctttctttgatacaattaatctatgatagatttaaaagactatggaattgagatgtggcctgaagatagaatcgcttcttttcgtcgcacacttttagggtggtatgaccaagaaaaacgtgatctcccttggcgaagaactactaatccatactatatttgggtttctgaaatcatgttgcaacaaacacaagttaatacagtaatcccttattataaacgttttctagagtggtttcctcaaataaaagatttggcagacgctcctgaagaacaattactaaaggcatgggagggactaggctattattctcgggtgcgtaatatgcaaaaggctgcacagcaagtgatggttgattttggtggcatatttcctcacacttatgatgatattgcttcattaaaagggattggtccttatactgcaggtgctatcgccagcatctcattcaacttaccagagcctgctgttgatggcaatgtgatgcgtgtcatggctcgtttgtttgaagttaattatgacatcggtgaccctaaaaatcgtaaaatttttcaagctattatggaaatactaattgaccctgacagacccggtgattttaaccaagcacttatggatctgggtacagacatcgaatccgctaagacacctagacctgatgaaagccctattcgtttctttaatgctgcttatttgaatggtacttatagtaaatatcccataaaaaatactaagaaaaagcctaaaccaatgcgaattcaggcttttgtcattcgtaaccaaaatggtcaatatctactggagaaaaatactaaagggagacttctagggggtttttggtcatttcctattatcgaaacgtcacctctttctcaacaattagatttatttgatgacaatcaatccaaccccataatctggcaaacccaaaatgaaactttccaaagagaatatcaattaaagccccaatggactgataatcactttccaaatattaagcacacttttagtcaccagaagtggacaatagaactcatagagggggtggtcaaagcaacagatttacctaatgctcctcacctaaagtgggtagcaattgaggacttttctctgtatccctttgcaacaccacaaaagaaaatgctagagacctacttaaaacagaaaaatgcttaatcacaagtgaactatgacggttcactttttgtttacaattcctttacgccgctgtaaagttttcctcagattatcttttaataccctataaatagtggtctatccctaatgtcaaatacatttgatagacccgttagcttatcatccttatactaatattatgaaaggagatatttatggaaattggtcagcaaattattcgctaccgtaaacaacaagcgctctcgcaagaagaattagccgagaaagtctatgtaagccgtcagagcatatctaactgggaaaatgacaaaacttacccagacatccatagcctcttactcctaagtcaaatttttcaagtgagcttagaccaactaattaaaggagacattgagaaaatgaaatataccatcactcaggttgataaaaagaattttgaacgagataccaaagtaatggtgacattgatgatactattaatgatttcaagttatccattagtctatttcttagagtggctaggacttggcatttttgttttattatcgataattactatgacttatgctaatcgtgtggaacgttttaagaaaaaatatgatgtgcaaacttataaggaaatcctagctgtttcaagtggaaaattattagacgaaatcgaaaaacgggaagaaagagcaaaacttccttatcagaaaccccttattgtcactgtatttttcctcattactgttgccaccttttttgcaagtcgttttattttcacatggttgttccatttaagttagtagataataaaataaagctcagcgtgacactgggctttattttatttaactcaattcagcaataatagctttcagttggtctttagtatgaacacctgcaacttgtttaaccacttctccgtcttttttaaacatcaatgttggaattgacataataccaaactgacgggcagtttccggattctcatcaacatccattttcaaaattttgagttcatcttcatcgatttcttgagataactgttctaagattggtgcttgcatacgacatggaccacaccaagttgcccaaaaatcaatgagtactaaaccttctttagtttcttctacaaatgtagcatctgttacttctaatgccatcttttttctccatttcatcttaatgataagcctattgtacaagaatctagttgtttttgaaactatttgctacgaactcgctaaataaataaacaaagccctaaaatcaagccaataaggtaacctacaataacatccttaggatagtgaatacctgctatcacacggcaaattgccaatagaaccgataatattaaacaaactattccaaagtaaacataatatcgtaacaaacacatactaatcatcgtagctgaaaaaacatgtctgctaggcattgaccttccctcagtatccttataaattaaaggtttaatattccatttttcatatggtcgtggaaaatcaaggcgtttcctaatgtaagacaaagctataaagccaacagcagggataattaatagccttaaccataattgaaatgtcatcccttgccaaagagtaaatatcagaaaagatggatagagtatgtacatcattcctgtgactatttttagtaaaaaatttaaaagaattattaactgtggggattttctaaaaggttgagatagtttggcataaaattgttcatatgattccataatttaccctaacgttacaattgtggcgccagatccccctgcattttgtggggcataagcaaaatgcttaacgtgcttattacgacgaagatattttgtcactccctcacggataacgcctgtaccaataccatgaatgatatcaacttgtcccatattgttaagcaatgcttgatcaataaaattatctaactcttgcatagcttcttcgtatcttttacctctaagatcaagtcgagctcttggtccagaactatcagcctttttaaccacattaatctgtttacttttgactttctgttcttcttggactctaacaagggtaaattcatcttgtgttaatgtcattttgataattcccacttgtgcttcccaacgtccatcttttaattgactagttaaggtacctcgctgtccatagctagtcactataatatcatcaccaattctaggagcacgagctgctttaatttttttagccttatttaagactttattttttgataaatcaacttgaggtgctaatttttttatttgtgccttagcatctataatttcgtgaggttttaattggctcttatcattgagtttttttaagatagtatcactctcattcaaagccatatctacaatttcttgagcttcttgatagattttttctaactctttatcgcgctcatgtgaaaattcattatagagtttcttaaccgcacgattgaatttgaggttttcttgttcaacttctttaatatgatccagtcttctacgtgtctcaagtgtctgtgcctctaactgttcaataatacggttaacatctgagtcagaatctgtcatctgcttagcttgtttaacaataaatggagctaaaccaaggcgagaagcaatttcaaatgcatttgatcgtccaggaactccttgcataaagcgatacgtagggctaagcgtttcggcatcaaattccatgctcgcattctctacaaaatttgtctcaatcccataagcttttaattctggatagtgcgtggtcgccatcgttttgatattacttaacctaaggtgttctaaaatagccatagccaaactagcaccttcttgaggatccgttcctgctcccagttcatcaaagaggactaaactattgtggtcagcctcgtttaaaatactgactatgtgcgtcatatgactagaaaaagttgatagactttgttcaatagattgctcatcgccaatatctgcaaagatattgttaaatactgcaattttactacctttatccgctaatactggcaaaccagactgtcccattaattgtgctaaaccgagtgtttttagcataatcgtcttaccaccagtattgggaccagtgatgacaattgcagttaaatcttgatcaaaatgtaagtcattagccacagggttacttaacagaggatgacgaacattgattaatgctaacgtgctgtcattagaaatctcaggtatcgtcgccttattatcagacataaaaagatatttagcccttacaaaatcaagatgcccaagaatccatgcattatttctaatagtggcgacatggggtcttaacaagtctgaaaatgcgtgtaaaatacgactttcttcatgacgttcgtcagctctaagctgcgttatctcttcgtttagtgtaactacagcacgaggctcaatataaacagtacttcctgaagaagagatgtcatgaaccacaccagaaatacgattccgataagtattttttactggtaggacacttcgtccactacgactagcgattagattctctgataaaagctctgctttttccttaagcatatcctgtaaaatctgacgaacccgtcgttcactgtttgttaattgacgacggatacgctctaattctggactcgcaaaatgttctaaaaaaccaccatcattgatagcttgaaaagacccttgcagattagggaattgttccaaattttcaaacaaacgatccaaagattggaaagaaacattatccaaatcagaataaaagtgaatcatatccgaagaactctgtaaaacttttttgatagccaaaagttcttgaatattaagatcagctgaaagctctaagcgttttaaactctcagagattgaacttaggctgactatgccaaatgagtgatgttcaacaaaaatctgttccatgtcagaaatttcattaaaacttttttctattttaggagcctccgtcatcggctccagctctgataattcttcttgtgattgttctgtcttgagataaggtaatatcaattccttaactttgttaaattctaactgttctaaaatcttgttattcatactcttcattatacctaaatttatcacaaaatgacaacgttaaaaaggttggaactcttactccaaccttactaaacattatattcaaagacctaccgcccaagtccttaccaaaaactgtgagaagaatggtaagtcgttaattaaaaatctaacaaacagactattccataacttttcttgaacaaatgacatagggactgttgccagaatagtcaaacacatactcataaataagagacaaaccagaacggctaaaaaaccactaataatattattttgcaagctatcaaaatgttcaactggtgctaaatgtagtaaaacacctaacaagcgacctactaagtaagataaactgtagataaaaacaaaggcaacacctgcataataaacatgactcaattgaaatttgctaatatctttaaaaaagtaaacttctactccttgtacaggattagaatacggtacccataacgtaatctgactagctaattcttggtaaaattgactagcaatcatcaaagataccattgacattaacacgtaaaagacttgtaaaaaaatacctctactgtagccaatataaaaatgccaaataacaataatcagcaaaagcaatgatagcatgattaatcctcactcactttttctttaatgtccgaaatcgttttggagcgtaacttattgagctcatcttccattttttcaatgtcaatttctcgacttagttgcactgataaagcattaattgccatgagaatagcaatcgtttcattatcagcattaggtaatttttctttaatagcttcatacttttctgtagctacacgctcaatctcttccataaaaaggttgtctttatctgtcgtcaatgtgagaggcttatctccaaagacaaatttataacgatttttctgactattatttatttttgtttccatactatacctctgctagcattataccgtaaaatagggctttcgtaaaattctaccccttatcattacttgtctattcccttattcctcttttttatgatagaatattgtctatgaacacaatcgtcatgcaagcagataaaaaattgcaagaaaagataagaaccgatttagctcaacatcatataagtaataacaatccttatgtggtattttcagctaaaatatcaggagctactgttcttttatatacttctggaaaacttgtcttccagggttctaacgcttcacatatcgcccaaaagtatggttttattgagcaaaaagaaagttgttcctctgagagtcaagatattcccataattggtactgatgaagtgggaaatggctcttactttggtggactggcagtggtagctagttttgtaactcctaaggaccatgcttacctcaaaaaattaggtgttggtgattcaaaaacacttactgatcaaaaaattaagcaaatcgcgcctcttttggaaaaagcaattccacacaaagcattattgttatcgcctcaaaaatataatcaagtggttagtccaaataacaaacataatgctgtctccgtaaaagttgctttacacaatcaagctatcttccttcttcttcaagatggttttgaaccagaaaaaatcgttattgatgcttttactagctccaaaaactatcaaaattatttgaaaaatgaaaagaatcaatttaaacaaacgattactctggaagaaaaagctgaaaataaatatctagctgtagcggtcagttctattattgcacgtaatctattcttagaaaaccttaacaaattaagcgacgacgtaggatataaacttccaagtggagctggtcaccaatctgataaggtcgctagccaattactcaaagcttatggtatctcttcgcttgaacactgcgcaaaacttcattttgccaacaccaaaaaagcacaagcattattaaaataaatagcagggaaaattatgaaagaatttattaaagaatggggtgtctttatcctcatcctctcactttttttactatcgcgtatctttttatggcaattcgttaaagttgacggacactccatggatccaactttagctgacaaggaacagctagtagttctcaaacaaacaaaaatcaatcgattcgatattgtagtggctaacgaagaagaaggcggccaaaagaaaaaaattgttaaacgtgtcattggtatgccaggtgatgtcatcaaatataaaaatgacaccttaactattaacaataaaaaaacagaagaaccttacctcaaggaatatactaaattatttaaaaaggataaattacaggaaaaatattcgtataacccacttttccaagacctagcacaaagctctaccgctttcaccactgacagcaatggcagcagcgaatttactactgtcgtgcctaaaggccactactatcttgttggtgatgaccgaattgtctctaaagatagtcgtgccgtcggtcccttcaaaaaatcaacgattgtgggagaggttaaattccgcttctggccaattcgtcgttttggaactatcaactaaaggaaattaaaaattcacctgacaaaagttgaaatagcatattatattgaaaatagggagtgacaaatccatttaaaatagggatttacaatcactccctttaactgtttattaaaaaggaaggtacaatggaagtattttttacaggaaccattgaacgcattatatttgaaaatgccagcaatttttttaaaatattacttctggaaatcgaagatacggatagcgattttgatgatgtagaagtaattattactggtactatggccgacgttatagagggagaagaatatactttttggggaacactaacccaacatccaaaatacggcgagcaactacaaagtgtacgctatgaaagagccaagcctacttcaggtggccttgtgaaatacttttctagcgaacaatttaaaggaattggtaaaaagactgcccaacgcatcgtagaactctatggagataataccattgataaaatccttgaatcccctgaacagttaagtacaatctcaggactatcaaaaattaatagagaagcattcatcgctaaactgaaactcaattatggaacagagcaagttttagctaaactcgctgaatatgggttaagcaatcgtgctgctattcaaatatttgatcactataaagaagaatcacttgaagtgataaacgaaaatccttatcaacttgttgaggatatccaaggtatcggttttaaaatagctgaccaacttgctgaacaagtcggtattgaaagtgattctcctaaacgctttcgtgctgctattattcatactttagttgagtcttctatggagcaaggagatacctatattgaggctcgtactctcttggaaaaaaccattactctccttgaagaagctcgtcaaatcgaactagatccttcaattgttgctaaggaattgacaaatttaattgcagaagataaagtgcaacatattggaactaaaatttttagtaatactctattttttgccgaagaaggcatcaaaaaaaacttacaacgaatactaaatcagcctcttgataaacaactaaatcacaaagatattgaccgtgaaatcagagatattcaaaaatctttaaatatccactacgataatatccaagaaaaagctattagagaagctttactaagtaaggtatttatcttgactggtggcccaggaacaggtaaaacaacagttataaatggtattattgaagcctattccgagttacatcatattgatttaaacaaaaatgatattcctattgtacttgctgctcctacaggtcgtgctgctagacgcatgaatgaacttaccggtttaccgagtgctactattcataggcatttgggattaaacggagatagtgactatcaaagtctagatgactatctagattgttccttaattatcattgatgaattttcaatggttgacacttggcttgctaatcaattatttgacgctttggactcgcacacacaagttattattgtcggagatagtgatcaattaccgtctgtaggtccaggacaagttctagcagatcttttaaatataaatgcacttccacacgttaaacttgaaaagatttttagacaatcagaagaatcaactattgtgactttagctaatcaaatgagacagggctttttgccagaggactttacagctaaaaaagccgatcgctcatactttgaagcatctgctaatatcatcccaaatatgatttctaaaattgttcaatctgcacttaagagcggtattgaagctcatgaaattcaaattttagctcctatgtatcgcggccaagcaggtattaataatcttaaccttatcatgcaaaatctcctcaatccattaaaagataataaccaatttacttttaatgatataaatttccgaataggagataaagtgttacatttagtcaacgatacagagcttaatgtttttaatggggatattggttacataacggaccttataccagccaaatatactgagagcaagcaagatgagatttatatgacttttgacggtcaagaagttatctatcaacgcaaagaatggcttaaaataacactagcctatgctatgagtattcataaatcacagggttctgaatttcaagttgttattctgccaataacgagacagagtggtcgaatgttacagcgaaaccttatttatacagctattacgagatctaaaagtaaactaatacttttaggagaaattggtgcatttgatttcgctgttaaaaacgagggggcaaagcgcaatacttatctgatagaaagatttgaaaacaagcaagaaatagctaattctcaaaaaattgaagatagctcaatagatcaaaagattgacaacacaataattaatacgtccattccaaaaacagcaacaccaattgagcagactaatctttcaaaaataacttatcgcctaactgaagaaaattatttaacaatcgatccaatgattggtattaatcaacaagatataagtgcaatttttgatagtaaataaattttttcataaaatcttgaaaactcttccaaatatgttataatatcattgtattaagaacgtagttcaaatttaatacttttattaaggtttatttagaaaaaggagatattatggtttcatatgaaaaagtccgccgctctctgcgcacagctacaatcactatcattgtattaaatagtttgtctttagtattcagattgtttacaggaatttcagtgcagctagccaaaactgaaattaataaagggaacacaggtaatcttcctaaagaacatatcgaagcagtcttgagcgccacaacaccatttatgctatttgtcactgctttaatagtattagtcaacattgccattgttattttctgtattaaaaatttaagagcaattaaaagaaatcaaacggttaattaccttccttattaccttggcttcgccattactgtaggacttgttattttgggttttctaactactaaagcaccatgggcaatagctataaatatcgtcttccaagctattttcggtcttctttatttccatgcttatcaaaaagcacaaaaactcaacgaacgtgatcttgaagagactaactaaaagtaaaagcactagaatctagtgcttttttcttttcaaagagagttaaatatagtcatcgtcccaacttttaaaaatctaaatagatagcttcatgttcattttccagggtcgttactgtaacacctaagagtcgtatgccaaaaactgactcttctaaggtatcaaatatcgctttagcaacttgatcaatgatttgaaaatcttgagtatactcttctaatgtcatacgtttcgtcaatgtttcaaaatccgcatatctaacttttaaaacgattgtcttaccaactttcttatttttctccagagaagcaacaactctctgaacgttctttgaaatctcagctttgatatctgcttcgttatatagtaatttcccataggttttctcacttcctattgatttacgaactctatcaggttttaccggggaagcattaatccctcttgccttacgataaaggtcatacccgaaacgaccaaacatatcaattaaagaaatttcagataaggaaaggaggtcctcaccagtataaacccctaaagcatgtaatttttcgacggagcgtttaccaacaccatgaaatttctctattggtaagggcttcaagaaatcttgagcttgatctggtaggatgagggtaagtccttttggtttctcaaagtcagaagccaattttgccaaaaatttattgtaggaaatacccgctgaacaggtcaaatggacatcattccaaatatcgtattgtatcattttagcaagtttaacagctgattttattcccattttattttcagttacatctaaataagcttcgtctatactcatcggttcaaccaaatccgtatactttttaaatatatctcgtacttccattcctacttggcgatatttttggtaatttcccgaaataaagatagcttgagggcatcgttcatacgcttcttttgaagacatagctgaatgaactccaaactttcgagcctcataattacaagtagaaacaacccctctgccgccggtttttctgggatcagaaccaataataacaggctttcctttaagagagggattgtcacgctcttccacagatgcaaaaaaagcatccatatcaatgtggataattttacgcgacgtatcatttattaaaggaaaaattaacattgttctctcccccattctctctactccattataacagattacaacttaatgatacagattaaaaaaactgtattataaaagaatcataattttgtcaagaaatatgcttgcgaaaacgtttactttttcctaaaatggatatgtaaacaaaattaaatctgtcacaatgtttaaggagaaaactatggcaacagttaaaacaaacacagatatctttgaacaagcttgggaaggctttaaaggtgttgattggaaagaaaaagcaagtattgctcgcttcgttcaagcaaactatgcaccttacgatggagatgaaagcttcttagctggagcaactgaacgttcacttcacatcaaaaaagtgattgaagaaacaaaagctcactatgaagaaactcgcttcccaatggatactcgtgttgcttcaatttctgaattaccagctggttttatcgacaaagataacgagcttatctttggtattcaaaacgacgagcttttcaaattgaacttcatgcctaaaggtggtatccgtatggcggaaactacacttaaagaaaatggttatgaacctgatccagctgttcacgaaatcttcactaagtacgctacaacagtaaatgatggtatcttccgcgcttatacttctaacattcgtcgtgctcgccatgcacacactgttactggtcttccagacgcttattcacgcggacgtatcattggtgtatatgctcgtctagctgtttacggtgctgactacttgatgcaagaaaaagttaatgactggaatgcattgaatgatattgatgaagagtcaattcgtcttcgtgaagaaatcaaccttcaataccaagctcttggtgaagttgtaaaacttggtgacctttacggcgtagatgttcgtaaaccagccatgaacactaaagaagccattcaatgggtgaacattgctttcatggctgtatgtcgtgttatcaatggtgctgcaacatcacttggacgtgttcctattgtccttgatatctttgcagaacgtgacctcgctcgcggtacattcacagaatcagaaatccaagaatttgttgatgattttgtccttaaactccgtactgtaaaatttgctcgtactaaagcttatgatgccctttactcaggtgacccaacctttatcacaacttcaatggcaggtatgggagctgatggacgtcatcgtgttaccaaaatggactatcgtttcttaaatacacttgacaatatcggtaactcaccagaaccaaacttaactgttctttggtcagatcaattaccatatgctttccgtcgctactgtatgtcaatgagtcataaacactcttcaatccaatatgaaggtgtatcaacaatggctaaagaaggctacggtgaaatgtcatgtatttcatgttgtgtatctccacttgatccagaaaacgaagacaaacgtcacaaccttcaatattttggtgctcgtgttaacgttatgaaagcacttcttactggtcttaacggtggttatgatgatgttcataaagattacaaagtatttgacatcgacccaattcgtgacgaagtactcaactttgacactgtaaaagctaactttgaaaaatctcttgactggttgactgatacttatgttgatgcgatgaatatcatccactacatgactgataaatacaactatgaagctgtacaaatggcattcttaccttcacatgtacgtgctaatatgggatttggtatctgtggttttgcaaatactgtcgattcattatctgcgattaaatacgctactgttaaaccaatccgtgacgaagatggttacatctacgactacgaaacagttggtgacttcccacgttatggtgaagatgatgatcgtgttgactcaatcgctgaatggttacttgaagccttccatggacgccttgctaaacacaaactttataaagatgctgaagcaactgtttctcttcttacaatcacatcaaacgttgcttactctaaacaaactggtaactcaccggtacataaaggagtatatctcaatgaagatggtagtgtaaacctttctaaagtagaattcttctcaccaggtgctaacccttctaacaaagctaaaggtggctggttacaaaacttgaattcactttctaaacttgatttcgctcatgcaaatgatggtatttcattgacaactcaagtttctccacgcgctcttggtaaaacatttgatgaacaagttgataacttggtaacagtccttgatggttactttgaaaacggtggtcaacacgttaacttgaatgtcatggaccttaaagatgtctatgacaagattatgaatggtgaagatgttatcgttcgtatctcaggttactgtgtcaatactaaatatctaactcctgagcaaaaaactgagttgacacaacgtgtcttccatgaagtactttcaatggacgatgcattaactaactagtttgtattcgatgaagtaggtttgattatatcaaacctacttttatctatattatcaatagtactaattacttctttatataacctcaaggaggggcctaatgttaaatcacaaatttcttcaagttctaaaatatgagggtgtcgtttcgataacaagctggatcgaattagctcctcacgttacaaacacttggaatagctacctgactattacagatgaccagcgtatattagctcctgcagcaggaatgactcatcttgaaaatgatctcaataataattctaaaattattatgactctgggcagccgtgaagtcgagggtcgtgatggttatcaaggtacaggctttagaattgaaggaactgctaagctattagaagcaggaagcgattttgaaattgttaaagaaaaatacccttttctgcgtaaagtattggaagtaactcccataaatgttatccaacttttataaaaaacttctcctagaaaattctaggagaagttttttattcaaagtacgatgttatcgcctcttgtacatgtcgtcgtttcttaatccaaagtggacggtcatcataggaaaaggttctgtttgtcaaaaaaatagctgctgcctgcttttgataatttagtgcaataaaaggaccagtataaccagtatggtttatccaatccttatctatatcccaagctaatgatcttgatttactcaaactataattattccacaaaggcttcgcaaaatcatcttttaaataatgaatagaaaatctttgtaaatcatcaatagttgaaaataaacctgcagaaccagtatgctttcctaataccttagctttaggatcgtgtacaataccatcgttaataccgactacagttggaacagcttctactctaggaccaaaagaggtttctttcatctgaaaaggagtgaaaatataacgtttgaaaagtttatccaaactatcccctaatacctcttctaacataaaaccaagtaaaagaaaattaatatcagtgtatttaaacgatttatcttccaaaaccttgatatgattaatggcatctttcagctgagtagcattcaactgatcacgatttggaataaaagggtcaattccactgctatgtgtagctaattgccttacagttaacgtctgatgatgaaacgtagggtaataataccttaatggcttatcaatatcaatagtcccttgataaactaactttgctagtaaagttcccacgccgacaacttttgatacactggctagatcatagaccaatcccgctttaactttctcattgccatcaattgtccccaagtaatgttcgtgccactctccattttcataaatagctaagcttgcaccatgataaagattatctttgatttgctccttaatgagttctaaaacagtattagttttaatcattcttttgaaatccaaatctcaatattactagtgtcagagatgactaaaatcttttctttagaatcaaggtaaacatcaagtcccaatgattcaaaagttgatttcaagtcatttaaattagtatcttcattaacacagcattctagtatctcaatatcccaagtttcatttggagcaatttgcaaatcttgtccctgtgcttctttgaaagataaattaattgggaacttcccagcaaatactttatcgtaaaaagcttcagctttcacggcatcaggtacattcaaactaatagattggaaagcaaagtttgatagacctgtagtgtcatcttttttttctaactctgggcgctcaattgccactaattgtgacaaatcatcttcagcatgaagtaagaaaaggtctccctcgggcgaaactgtttcataggcataaccattttgaccttgatatacttgaatggcttgcgcaccatttgccaaaagcttttcaatatcttttgcatcttgagacttaacaataatctttgctaacttcttagtaccattcaccgcacgagtacgataagttggggattcctcaataataaagctagcctctttgttctgccatgctgagaaaactgcgattgcattttcttcacttatcaatttaaatccaagagactcctgataaaatgcaatattcaagtctctattattaacacgtaatactgggtgtttaaatgtcaatgaatgaaataacgtcataaattcctccttgttcagtctagtctattttagataattttagataatttagcaagaatctttgtgctctcaataccataaagtcaaattgacagtttcactatttttttgtagactggatattatgaatgaaacactactattacatgggattcagcttattctgattatcgccatgattatcactttttatcagattgttagacatattaggtctcaaaaaataaatcctttcaaacgatttttcactggtttgtggatcggttttgtaactgatgctctcgatactcttggtatcggctcttttgcaacaacgaccacattttttaaactaactaagcttgttgaagacgatcgtaagatacccgcaacaatgacagctgcacacgtacttccagttttgttgcagtcactctgttttatttttgttgtaaaagtagaggctttaacactaataacaatggctggtgcagcttttattggggcttttgttggagctaaaatgactaaaaattggcacgctcctactgttcaacgtattctaggaacactgctcatcacagctgctattattatgctctatcgtatgatcactaaccctggcgctggtatttcagattcagtgcatggtctacacggcatttggttatttgttggtatcggcttcaattttattattggtgtattaatgactatgggactaggtaattatgctcccgaacttatcttcttctccctaatgggactgagtcctgcagttgctatgcctgtcatgatgctagatgcagctatgataatgacagcttctagtacacaatttatcaagagtggtcgtgttaattggaacggctttgccggtctggttactgggggaatattaggcgttattgtcgctgttctcttcttaactaaccttgatcttaacagcttgaaaacactggttgtaggtattgttttatttactggagcaatgttaatacgttcttcctttaaaaaaactatgcccaaaagtcatcattaaacgaaatcagctagcaagactggctgatttttatatttaaaacaaaaaaagaccggtaaaccgatctttctttaactattaaagatataatagtttgaacaaggctacagcgagtatacttgctacgattggtgctaaaactggcacccatgcataccaccattttgaatcttctttagcttgtccaagaatttgttttggtaataagcggtgaacaatacgtggaccaaggtcacgcgcagggttcaatgcaggtccagtcggtccacctaaagaagcaactagagtcattaccaagaaaccaatacctaagtgagctacagcaagtgaaccagttacgtatggtgaaatccttgtcgctgctgtcgtttggtcataaccagcttgaacaagtttaccaacaagttctacaccaaaatagttcttcgttaaagccaaagctccaaagaaaagaacaaaagaaccaacgaattcatttaagaaaccattaatgtaagccgctttacgacttgatttctgtccatcatctaatgcagaaatagttgaaaatgatccaagaacatgatttggattttctgtcttaacaaagtaaggttgataaaccataacgacaactaactgtccaaacattgctcctaaaatttgtgcaagaatgtattgtccaacgtgtgcccaagggaaaagacctgaaaatgccaatccaagtgtgaaagctgggttaatatggtttccagagacattaccaaacataagcgctggcatcataacacctaaaccataaccaattgcaataataatccaacctgaattatttccttttgtgccttttaagtcaacgttagctacagccccatttcctaagatgataagaaaagcggttgcgataaattctgtgatatacttcacagtccaagtgatttcgatcaatccttgtttcctcccaaaaaaatatttacaacattaaccattctaccaagtaagcttaatattgtaaagcttatcacaaaataaaattaataaaatttttaaccaaatatatttgataaaaaatagagtactaggttcggactacctagtactctattttatttagtttataaggttttcttactatcacgaacgactagcatatcaactttcgaatgacgtaaaatgtattctgaagttgagccgatcaatagtctttcaaaagtgtttaatcctgttgcgcctaccataattaaatctgctttttcccttatggggatatcctttgccaaaagagtcttaggatttccgatttcagtaatttttttaatctttgtaaggccttttgaatgtgctaatttctcaaaataggctagcacatctgctgactcttgttcttgcctatcaaaaacatagtcactaaagactccctcactttggtaagcgtgagcatctataacatgcgttagcagtaattcagcatcattacgaagagcaacatttatccctttttctaccgccaattctgactcgtaagacccatcaatagcaataagaatacgctcatatttttgtgtcatagcttaattcctcccttttatatagttttagtttcaacttgtctagatgattttaagaaatatagaataccacaaacaacaggaataatcgctgctatccagaataattctctaaaggattgcacaccagctccaagaaaaccatctttaacaagtcccaaaatgtaaggtccagcacctaaccctaaatcaagacctatcatgtaagttgacatggctgtattgaaacgatgttcctcaacacctttgattgatgctgcttggccacaagacataaaggtgccataaccaaaaccaatcaaagcacctgatagaaggtaggtaacacttcccatagcactccctaataaagcaagtcccaaagttaagaacagataacttggataaagcacccacttatctcccttagcgtccattaatcttcccatagatggtctggttaaagtgatgacaagtgcataaacaataaagaaataagctcctactgtcatcaaattaatttctgttgtatataatttttggaaacctaacacggaagcataggagatacccatcaaaaatgcaataattgtgataaaaattgcttttttctcaatgaaactatcaatagtccatgattttgatttagctaactgttctggatttaaagtaatatttttgactgggaaaacaaatgctcccaacactacaatcgcaattaaaatactacataatacaataaccattttaaagttaatatgaaggttgtctagcataaatgttcctacaaaaggaccaatagctgcggctaaacttgttgatagaccgtaaaagttaatcccctcacctcttttatcagctggtatataggctgttacaatagtattagttgctgttgacacgacgccataaccaaaaccatttaggaaacgaactaaatacattactccgatacttggcatataaaaataagctaaagttgttagtaagtaaaaaatagcccctccacgtaaaactaacttacgtcctagaacttctaattgcttgccaaatataagacgagcaatcaaagtccctacaatataaatccccgttgctaatcctgcttggctagtgctaacacctaactctttagtcgcaataaaagctatgataacggtaaacaaataatagaccatataaacaataaagtttaaaatagtaatgcctataaaatgtttgttgaataatttgtcttccaatgcaaatggctcctttttttcaatttcattttcataaacattttacaaaaatattagaagatacgatatttcaatggtataatataagtgctagtatcagactgcattaacaaatgttaaggtggtctatcaaacctaaaacatttggaggaagtcatgaatcatcaaattttacaaaattacattaatagtcataatcttccaattatcgaaaaagactaccataaataccttacatttgaaagtttagaagaagactatacttatatcctaaaagatggtattgttaaacaaagtgttctctctaaatatggtactgagttcaatctgcgttatgtgacaggcttagaaatcacttctatcctaaatacagactactcccaacacatgggagaaccttacaacgttcgaatcgaatccgaaactgcccacttttacaaagtacgtcgctctaccttcctaaaagatatcaataatgatattgaactgcaaggatatgtgaaagatttctatcataaccgccttgaaaaatctatgaaaaaaatgcaatgtatgctcactaatggtcgaattggtgctatctccacacaattatatgacctcagtaagatgtttggtgaagaacgagataacggtgatatctatattaattttgttatcacgaacgaagaacttggtaaattttgcggaatatccacaggaagtagcgtgagccgcattttgaaacaactaaaagacgatcatattattcgtattgaaaaacaacatatcattattacaaatgttgagaaattaaaagatcatattgtattttaatataacaatagaaaggatatattatgcgttataatcaattcagctacattccaactaaacctaacgaagcttttgaagagctcaaaggactaggttttccattaaacaaaaagaattctgataaagctaatttggaagcttttctcagacattcttttttaaatcaaactgatactgattacgctcttagtctccttatcgttgatgcaaaaaccgatgctctaaccttttttaaatcaaatagtgacttaacactagaaaatttacaatggatttatttacagttattaggctttatcccttttgtagactttaaagaccctaaagcattcttacaagatattaacttcccagtctcatatgacaatatttttcaaagtctacatcacttactcgcctgtcgtggaaaatctggcaatacattaatcgaccaattagttgctgatggtttacttcatgcagataatcactaccattttttcaatgggaagtctctggccactttcaatactaaccaattgattcgcgaagttgtctatgttgaaacatccttagatactatgtctagtggtgaacatgatttagtaaaagttaacattatcagacccactaccgagcatactatccctacgatgatgacagctagcccctatcatcaaggtatcaatgatcctgccgcagaccaaaaaacataccaaatggagggtgcgctagcagttaaacaacctaaacacatacaagttgacacaaaaccatttaaagaagaagtaaaacatccttcaaaattacccatcagccctgcaactgaaagcttcacacacattgacagttatagtctcaatgactattttctttctcggggttttgctaatatatacgtttcaggtgtgggtactgctggctctacgggtttcatgaccagtggggattaccaacaaatacaaagctttaaagcagtcattgattggttaaatggtaaggttactgcattcacaagtcataaacgagataaacaagtcaaggctaattggtcaaatggccttgtagcaaccacaggtaaatcttatcttggtaccatgtcaactggtttagcaacaactggcgttgaggggctgaaagtcattatcgctgaagccgcaatctccacatggtatgattattatcgagaaaatgggcttgtgtgtagtccaggcggctaccccggtgaagatttagacgttttaacagaattaacatactcacgaaacctcttagctggtgattacatcaaaaacaacgattgctatcaagcattgttaaatgaacaatcaaaagcaattgaccgtcaaagtggggattacaaccaatactggcatgaccgtaattacctaactcacgtcaataatgtcaaaagtcgagtagtttacactcatggactacaggattggaatgttaagccaagacatgtctataaagttttcaatgcattgcctcaaaccatcaaaaaacacctttttttacatcaaggtcaacatgtgtatatgcataattggcagtcgattgattttcgtgaaagcatgaatgccttactaagccaagaactacttggcattgacaatcatttccaattagaagaggtcatttggcaagataatactactgagcaaacttggcaagttttagatgctttcggaggaaaccatcaagagcaaattggtttaggtgatagtaaaaaacttattgataaccattatgacaaagaagcctttgatacttattgtaaagacttcaatgtgttcaaaaatgatcttttcaagggaaataataaaaccaatcaaatcactattaatcttcctctaaagaaaaattatctcctgaatggacagtgcaaactccatctacgtgttaaaactagtgacaaaaaggccattttatcagcccaaatcttagactatggtcctaaaaaacgattcaaagatacaccaaccatcaaattcttaaacagccttgataatggtaaaaattttgccagagaagctttacgtgaactcccgtttactaaagatcattatcgtgtcatcagtaaaggtgtcttgaaccttcaaaatcgtacagacttacttacaattgaggctatcgagccagaacaatggtttgatatcgagtttagcctccaaccaagtatatatcaattgagtaaaggtgataatctaaggattatcctttatacaactgattttgaacataccattcgagataatgctagttactctataacagtagatttaagtcaatcttatttaactatcccaactaatcaaggaaattaacttatgaaacttctcactaaagaacggtttgatgattctcaacacttttggtaccagatcaatttattacaagagagtaacttcggagcagtttttgaccatgataataaaaacattccacaggttgttgcaactattgttgatgatttacaaggttccggaagttcgaattatttctggtattttggcaatactactgatacttccatccttatgattgctcatttaaatcgaaaattctatattcaggttaatttaaaggactttgactttgcactcaatttaatagctataaataattggaagagtctcctccaaactcaactcgaagctctaaacgataccctagcaatatttcaataaataaggtagaatggagtgacaaagcaacgcgagggagactgattaatgtcatcttattggaataactatcctgaacttaaaaaaaatattgatgaaaccaatcaactaattcaagaaagaatacaggtcagaaataaagatattgaagcggcgctaagccaactcacagctgcgggaggaaaacagctcagaccagcattcttttaccttttttctcaacttggtaataaggagaatcaagatactcagcaactaaagaaaatcgctgcttctttagaaatccttcacgttgctacattaatccatgatgatgtcattgatgactcaccactaagacgtggaaatatgaccattcaaagcaagtttggcaaagacatcgcagtttacactggggatttacttttcacagtctttttcgatcttattttagaatctatggctgatacaccatttatgaggattaatgcaaaatctatgcgtaaaattctcatgggagaattggaccagatgcaccttcgttacaatcaacaacaaggtatccatcactatttacgtgcgatttcaggtaagacagccgaactctttaaattagctagcaaagaaggagcttactttggtggtgcagagaaggaggttgttcgtctagcaggccatatcggctttaacattggtatgacattccaaattttggatgatatcctggattatactgcagataaaaaaacatttaacaagcctgtcttagaggatttagcacaaggcatttacagccttcctctacttcttgccattgaagaaaatcctgatattttcaaacctattttagataaaaaaacagatatggctactgaagacatggaaaaaattgcttatctcgtcgtttcccatagaggtgttgacaaagctcgccatctagctcgtaaatttactgaaaaagctattagtgacataaataagctaccccagagctctgcaaaaaaacagttgctacaattaactaattaccttttaaaacgcaaaatttaaataataaaaaaacattccacaatgctagaaaagcagttagggaatgtttttttattatcatttatttatcgcacctatcaatcatcatagatcaccatcatcagaggctttcagctgacggtaacgttggctactttgagacaattcttgaggagaaccttccaactctaattgcccattttctataaataagatacgatcagcatgttcaataccttttaagtgatgtgtaatccaaactaaggtcttaccttccaattctttcataaatacccttagtaaggcttgttcagtaataggatcaagtccaacagttggctcatctaagataacaattgggacatcttttagtaagattctagccaaagcaattctatgcctttcgccacctgaaaacctaagtccagcttcatcaaccattgtatagagaccatctgataaatcagtgaccatctctttcaatccaactcgttcaagaactttccatacatcttcttcactagcatcttggtttccaatgcgaatgttatttagcagggttgtattaaaaaggtagggcgcttgttgtatcactccaatatagttagaaatgcaatcaccaactattgaaacatcagcatcgcctagggtaatctccccttgacttgctttcaagtcgccacgaagtagactggctaaggtactcttgccagaaccactacgccctaaaatagcaattttttctccttctttaatatccaaatctaaatgatgcaaaacccatttctcttgtggcttatactggaaacttaaattcttgacggaaaaatcgtatggcttattaggcaactgattttgagttgtttcaaaatacgtttctgataattcattaagacgatgaattgaatcagaatatttatttgtttcttgagcagcagcagacaaaccagcaaatgcctctgacaagggaaatactgttagaacaaatgctgcaatccagttagcttcgccacctctgtgaccaataaactgattactagcccaaataataaccaaaatagctagaaagccaaaaactaattccacaataagagctctacgattatcaaaggaacgaatttttttctgaacagccatgagttcactttccgaacgctcatgcaaggcgacgtactcttgaccacgttgactaaaaatccagtctgaaatacctaagacattatccgtcaaatcagtataaagatgattttttaattctttttcacgagtctgacgagcaccattagctaaaatcgaccaaagtggaaaaagaaaaatcataatagctaaataaagcaacatcattaaagcaaaccatagagaaaagaagcctgttgcaataataataaagctatataatatccacgctataatcgttggaaatattgtcctaagatacaaattttgcaaataattaatatcctccgctaaaagccccataacatctcctaaacgaaaatcacgcttcataaagatagcattgctttctaaggaatggtaaagcttcaagcgcagctgtgaagtcattcgtaatacccaattgtgactcgttaggcgttctatataacgaaaaacaggacgtccaatgccaaaagcacgtgttagtacaattggaacatatactagaagaatattactcggtagtgaagctgacttactaatcagatagcccgaattaaacataagagcactggcagaaaagaaagtcataaaaccaaggaaaagagcaattactaaggaaactttatattgtttgaaaaatggttttatccattgatctgtctttaattctttaaacaaagggattttaaacatcatttcctcccatagcatgcttcagttgatagagatatccttttttagctaataattcctgataagagcctacttctgcaactctccccttctccataacgactataacatccatttggttcaaccagtgaagacgatgagttgcaaagataactaaacgatctgacatcagtggcaacattttctcttttaattctaactctgtttcaatatctaaatgagcagttggttcatcaaaaaccataatacgacgattttgatcaagaaaagcacgagccagagctatacgctgggcttgtcctccactaagcggacgcgctccattaccaatacgcgtttctaaaccgtcaggtaactcgcttagcaagctatctaaacctaccatatgaatcgctcttaccacctcttcgtcactagcattgggagtatagaaggtaatattatcacgtaatgacatttcaaaaacataaggagtttgaggaatatagatcatctgtttatgccaatcttcttgatcaaggttagtcacttctctaccatccacttttaaagaaccattatcaggccctaaaaaaccactcagaaggttaattaagctagacttacctgaaccactaactcctactaaagcaaccttttgatgtcctctaaatcgtaaggttacatcctcaacaacacgtttttggtcgtacgcaatagcaatgttttctaaatccaaacgactctctttagaccaatcatctatgactaattgctcacctttaataccagttttgtttagaactttttgaatcgcttgaaatgcatttttcccgtctaacgttgcatgataatcactagaaaaatctcttacgggtaaaaagtattcaggggataaaatcaaaattgttaaagccggtaaaaggtaaatctgctcatttaataatcgtaaacctagaaaaacagcaacgatagcaatggataaagttgtaaaaaagtctaaagcaaacgttgataaaataccaattttcaaagtactcattgttgctttacgaaaagattcactagtttgataaatgcttttaccataacgtttactaagaccaaaatatttgagagtatcaatgcctcgtaatgaatctaaaaaatgattagaaagtacttgataggattcatattgtttatctgctttagcttgagccgcatagcctaaaataatcataaagatgataattaaaggaaaaacgataagtaaaattgcacctgattcaatatctaaatagaaaatataagctagaataatccatgggataatagacatgttaatcatcttattcaagactaaacgtaaataattttcaactaaagaaacgccatctaatgccattgtaacaacattaccagttccttgttcttgaacgactttaggacctagatcaaataacttatctaataattgacgtctcaaaagactagattgtgctgttgaaaagtcatcaagttttctatttttgatgtaatcaataacatgacggcctaaatatgagaccataaataacaaaatataaaccgtttgagaagaaagtttttgcccttcccacaaaccagttatagaaagactcaaataataagcttgtccgataataaagattgcttgaagaacatcaagtcccgcaagcaatcctaacaacttatgaatacctgacaagcgcataaccgctttatctagcattatttttctcctgtcacaatcactggcaaggtaatacgttttctaaagatataatatgcccatgctgtataagctagaacaaagggaactagagtaattgcgacaatcgacattacttttaaagtatatggcgttgaggatgcattttgaatcagcaaatcatatttagggctaattgatgaaatcataactcgtgggaatagaccttggaacaacagaacaaccactgaaacaagactgagaccactcgctaaaaatgctgtcatctctgctcctttaaaagttgaagcatgcgctaatacagctaatacaacaataaccaaaaccataattgtcgtaactatcggatgattgctaaagaaatctgtcttgaaatacaagagaactgcaaacaaggctaaaccaagatagagtacccaataaagcaactgagcataattacgggcacgctctctaattggcccttctgtcttcaatgcaatgtagtttaaaccatgaagataggctagcaataccattgcaactccacccaccaacgagaatatattaaagtaatcactgaattgagctgataagttaccactggcatcaagtggcataccttgaatcaaacttataaacataatcccaaagaagaatggaacaatagcggaaccaattgttaaggtccagttccaaaactgctttttctctgcaggaactttatgtctaaattcgaaggaaacaccacgaataattaatccaaagagaatcgtaaggagaatcaaatagtaaccactaaatagtgaagcataccagtatggaaaagaagcaaacattgctccaccaccggtaagaagccaaacttcattaccatcccaaactgggccaatggtttctactacttgatctttttcatgctcattatgtgttaaagtttgaacagccatcccaaccccaaagtcgaatccttcaaggaagaagaatcctgaaaataggaggccgattaggaaaaaccaaaagaattgtaaagcactcatttagtatgctccttcctcaaagggatcaattgaagtatatgcaccatgatgtccgtgttcatcttcatactctggccctttcttcaattctcttattgttaggcttatcatcatcaccgctaaaccaccaaacaacaagaaatacacagtattggaaacaaataatgatgcaactgaaacgtttggagagacagagtccttaatcttgaaaagaccatagacagtccaagggtatcgtccttgttctgtcacaatccaaccaaatgtattggctaagaatggtgcaaaggttgttaaagcaacaatccaaagcatccatttgtgtttataaagaattggttttttcttacgagttaaaaagagtcctaaaacagaaacacccataatagctgttcccatcgccgccattgtacggaaaccatagaaaagtaggttaaccattggatagtagttatctttaccatacttagcaaccaattctttattagctgtatccatacctttcacagaaccagatggtttcccgtaagataaaatactcaacatataaggaatcttaatcccaaaaacttgtttgtgttctgcttcatttgcccaagcaactacactccaagctgcaggatcacccgaatcttcataatcaccttccatagcagcaaatttcattggttgatcgtgaatcaaggctttcatttgtaaatccccaactcccataactgaaattgaaccaagaagtgctactactaaaccaatacgaaccgatttcttataaagttcaaccgttgtatctttcagctgttctgattttaagaggcggaaggctgacataccagcaaccactgtaccacccatcgtaatggcaccaaaaataacatgggtaaattcatagaagaactgtggattttttacaagtgcaagaaaatcagtcatttgcgctctaccgtttacaacttcataaccaacaggatgttgcatgaagctattagcagtaagaatccacatcgctgacattaatgagccaaaaaccactagccaaatgaatgtcacatgtaattttttactaatttttttgttatcccatgtaaacatccataaaccaaggaaagtagattccataaagaaagctaataaagcttcaatagccaatggagctccaaaaatatcacctacgaaacgtgaatagtctgaccagttcattccaaattggaactcttgaatgatacctgtcacaacaccaaccgcaaaactaaggagcatgatattaccccaaaattttgtcaattttttatactcttcattttttgtgataacatacattgtctccataatagcaaccactaggcatgtaccaattgtaaatggtacaaagaaaaagtggaaaactgtagtcatcgcaaattgaaaacgagctaaagtttcaattgtcatacaaaacctcttattttgttttaatcatttcttttatagaaatatctgcaagagctagtttcctagcttcgtaacaattggtaaataacttactttaatatcttaatgatataaatcaaaacgtcccttagctagaagttctttaagtccacccatatcaacaagtgatttgttcatgataatcttcttcataaccgacgcagggtattttttaattttagtttttccaacaacaccaagtccatgcgtatttcctactgaagcaactgtgccttgcggactatacgaaaagtcttctgtagcttcacctttgatttgatgtaaaaggtttttagcaacatgagctcccatacgagttgcaatttgagctgttgttgggaatgggcgaccagactcagtgtccataaatgcagacacatcaccgataacataaacattatcgtattttggatcacgcaaatcactgttgaccattacacgtccacgacgttgatcaaatcctgattctcccataaccggacttccactaacacctgttgtccaaatgatagtacctgcggtaatagatttgagttcttcatcctctttactagtaccataaacaacttcacccggtttgatttccttaatcatacttccaagcatcaaattaatacctaaatccttaattaagttgacaccatattgcgctaattcatcatcaaacattggtaggatgcgagttgctgcctctacacaaataatttcaatttgttcaggttttacacccgctaaagcagcatattttggtcgctcatcaaccatagctccggctaactcaatacctgtaaaaccagcaccacatactaagagtttgagaagattttcatcttttgtctcacggtacaacttcattgtattaacaatgtgattatggatgttttctgcttgcgaaatattggtcatctgcaaagcattctccatagcacccttgatgccaaaagtttcagatacaaagcctaaggcaactacgacataatcataatggagttcaccgttatttttaactgttactgttttattttcagcatcgactctaagcacctcatcttgcatgaagttaaccttattagtgttgataacatccttaattgggaatgtaattttttcttttggctgagagcctgcagctacttcatgtaattctgtagcttcgtagtgataatcattcatgtcaacaagggtaatatgaaaatcacctgattgtttttgtaaattacgaactgctttcaaaccggcataaccagcacctaaaactaggatttctttcatgataaaactcctctaaaaaatgattccaattagatacgttaagacttgggttgcagatcccagtgctagaatacgtaccgcacaaacaaatgtttctctcttaacctgtttttgccacaatagttttgtctgcttataaataaatggtattaataacaaactcaagagtactgtaacaggcgcaagtccaaaaagaaattcaaaaacaattgccaataaagctatactattagaaatagcaaacagcaagagtccacctcttatccctgtataatgtacaagggtatagcgatgatttttttcatcttcttctttgtcgcacagattattcgccaacattagattggcaatccataaggtgttcggcaaggaaatcaagaaaattttgcttaagttgaggatatcccacgaaaagttttgataagtgtttagatatacacaaattaaactaatcataaatcccattgtcaagccagaaaatacttctcctaagggcagactagataaaggtcttggaccaaaggaatataaaacaccaattccaaaacaaaaaagtcccatccataaaagaggcagaccaacttgggaaactaaaactaaaccaatcatactagaagtaatgactaaacttgccataataacttctatttggcgtagggataggttctcacgaccaataatgttagtgtcattcttataatccaaatccacagcattccgataatcattgtaattattccaaatgtcaacgaacatattgaataaaaacatagcaacgaagaataaaccgacatatacagggtgtactgaattgtagtaataagcactaaaacacaaaccaatcaaaaatggtaaaacactagctgttttggctttcatttctaccaactctagaaagattggtaatgtcattattaaagtcctctctatacataatcttcaacaatactattataatgcaatttctaccatttttaaaacaatagggcttgatttttgattaaaaatacaaaaaatttttcttaaaatgagttaatcacacttagaacactaaatactattttgaggagtcctattcatcacactatgccatgtaatattcggaaaaatagtattgcaaccctcaactatcccttatgttggcaccagcctttgaaagtcctctgattgcactgcttagttagtattttcatcagctgtatgatctctaagagccatcagcatactaaaaaaactagtattacactttgaaaagtgtaacactagctccaatttgttttaaatagcttaactatttaatcattaatctactttatatatttaagcatttaaagttgaatgttggttgaggatacctgagagagaaccttgaatataatttggcaatacttgtttttgagcacgttcatagatttctgaatctgttaactgacgttctgatttggggcttgatacttgcggtgtcactgctgcattttgttgtttgtaaagtgttgaatgctggttaaggatacctgagagagaaccttggatatatcttggcaatacttgtttttgggcacgttcataaagttctgaatccgttaactgacgttctgcttttggaggtgttgcttgcggtgctgtgaaagttgaagctgaaacaccttgtgtagaaccaagagctacgaatgctcctccagcaaacattgctgagacaagaccaagtttcaaatagttagcagttgagacgttgttgacttttttttctgtaataagtttgttcataagaattacctctttcttttgggttatttattttatgaactaagtataacaacaagaaataaagtaaggttaaactaaatataaaataattcttaagtcattcttaggaaaccataaaatcatacactaacaaaaaatttggtatctagctcaaaagtaaaagtagaataaaggcttttacttctgagctagtaatgaataaattatatttgcatctagtttggaattagccctagtgtattataatgatccctacaaatatgtgccaaacaccttcttcatatatacaagattgatttaacattcctatacccttaatggtgggcacattctcttcatgttccatatagaaatcaacagataattccgtattgtccctattattaaattttccagttaatgataaattatatcatccaccttgaggtgtcctattaccaatctgttcaacctttacacttgacgaatcgaattgaacagattctgtcttatcattctgtgatttagaacatcaacaatttcttgttcatgttctttgaggtaagctagttgttcttctttaacgtgcttttatctttcgtacttactgatacttgagagcatttttttgaccctacttcttactaatcagctgacgtccctataagatgaatcataaacacatagctgccactaaccattttaaccttttatgcatacataattcttcttgatatcccataccattatctttagtataaacacttaataaaacaagcatttaacaactaaggttaataaaattcaataaatctaatccttctacttactttagtttatcacttttttctctcatcctatgctataatagtaaggtatcaaaatttaggagaatatagtcttatgatgaatatgcaaaatatgatgcgtcaagcacaaaagcttcaaaaacaaatggaacaaaagcaagctgatttagcagctagccagtttactggaaaatctgctcaagagctcgttaccgtgacatttacaggcgataaaaagctaatttcaattgattacaaagaagctgtggtagaccctgaagatattgaaacactacaagacatgacaactcaagctatcaatgacgctttaagccaagttgacgatgctacaaaaaaaattatgggagcatttgcgggtaaaatgccattctaaaaaataaatcacatttactgaatcacctgtaaatgtgatttttatttcaaacttctttcattttttcacgaaaacaagttttattttcaaaaaatatttgcaaaaaatcagcagagaggtataataacattgaaaatattagagagaaggtgactaaccatggttatggatagtctaatcataaaacagttgattaagagtacatttgatatacccttacaagtcacttatccaaatgggaatattgaaacttataatggtagcaatccccacgtcaaacttaaactaaacaaaaatttctccgtctcggagctatcaaaagacccttccatagtattgggtgaagctgttatggatggagacattgaaatttatggttctatacaagaattaattttatcagcttaccgctgtggagacagctttctacgtaatagtaaatttagcaaattgattcctaaacaatttcatgataaaaaacacagtaaatccgacattcaaaagcattatgacatcggaaatgatttctataaactgtggcttgatgataccatgacttattcatgcgcctattttaaacatgaaaatgatagtctagagcaagctcaactaaacaaagtacaccatattcttaataaattaaatgctcagccgggagggaaattactagacatcggttgtggctgggggacacttatcattactgctgctaaagaatatggcttaaatgcgacaggtatcaccttaagtgaagagcaggcttctttcattactaagcgtatcaaggaagaagggttggaaaataaagtaacagtcctcattaaagattatcgtgacattcgtgaaacatacgattatatcactagtgttggtatgtttgaacatgtaggaaaagaaaatttatctcaatacttccaaaccatttctaaaagactcaacatcaatggtctagctcttattcatggtattactggacaagtgggtggtaatcatggtagtggaactaattcttggattaataagtatatcttcccaggaggatatatccctcgtttaactgaaaatttaaatcatatagctagtgctggacttcaaattgctgacttagaaccgcttcgtcgtcactatcaaaagactctcgaattatggacaaaaaatttccacaatgcccttcctgaagttcagaaaactcatgataagcgttttatcaatatgtgggacctctatcttcaatcttgtgcggcctcttttgaatctggcaatattgatatttttcaatacttgctttcaaaaggtgtttcaaaagacactatgcctatgacacgcgattatatgtattctgctaattgatatagttaatattatagtattccaacttattctaaataaaaaggactctcttgaattcaagggagttctttaacgttcttctctggctaactctatacaatgtgacttttggtgacaatgtggacagaatacttttcgcgtcttaggggtatgtttcgctagattaaatgcttgatatgtcggtgtaaaggtttgatgacaatttggacaaagataaacaacctgttgtttaaaataccaaaccataccattcatagctattaagaatactgttactgctatccacataagccatctttgatttagagaaactgctgctattattaacgtaatatagaccataataatcataacgacttgtagcactatgcttttttgtagtataccccattttcttttgttttcttccataagcacaatgtcagaaagatagcctaatgttttactatcttgtttttctacagtttttagtaggttgacagctttgtcaagtttgtcttttttactatcaatagctagccttaattctcttatctgcacttgtaaaaaaagctctaaaatctggctagcattgtcttcagtaaatagatttttgatattatcaattgaaaaatctaaatctcgtaaataaataatttgtctaagcttttctaaatcagcaatactataaaccctcctacctccttcagatagttctgatggggataaaattcctcttttgtcatagtactgaacagtacgaacagtaactcctgcttctttagctaagtcaccagtggaatatttttctgacatgtttcacacctcctttaatatagtaaacacttctttatcagaaacacctttactatatcaaatgacctaaggtaataagcaagtaataacgctaagtatttttaactttaaataaaactacaacaattaatcaaacaaatttcctaaagtcgcaaatgggctatcaactgctacctctttttgctgttttaaatagattttattttcatccaagtccagaaatttttcataaacacgcgcagtcatacgggcatcctctaagctattatgtgctttaccctttattcctaaaaagtcagcaacagtagtcaatttaaggttgacaataccatttaaatctgtactgcgtctcacaaaagcttcatcatataagtccacctgatattgactagttagatccaaaccattttcaactaaaaggggtaaatccgatttatacccattataaccaatcagtggtgtatctccaacaaaactctgaaagtctgtcaaaactatctcaattttaggagcccctataatatctctagctgtaatacctgttaaaccattaataaagctttgtaatggaacttttgtgtgaacataagtatcaaataaagcaatctcttgatgattagaatatttaacggccgacacttgaataatatggctatgctcaccaaccgtgttaaactctaaatcaaaagctatatattcttgtaattgtttcattatttctcctaaaaagcgcaaggaaactccttacgcttttattctattttttattgaagaaacgtccaaagaaactttttttaacagcttctaattcttgaattttttcttctttggcttcttgaatctcctcaacctctgctttagcttcatttaactcaagttgcagacgttgcgtatcttccatagcagttaaagtcaattgctgttgttgatctaattgcttatctttctctgctatttgaatatcttttacatgtaactgctcgtcttttgaagcaatctgaatatcttttgcttttaactgttcatataaacgtgtgatttcagtattcttctcatcaacgagaatttctaaaagttctcgtcttgatgcttcttcgtcaattggttcctcttccaaaatagtttttttatagatttcttccaatttaatcaagccatcacgattaacaactgtaacgcctttactattcttttccacacattcttcagggagtgttttaactctgttattcatcgcttgacgactaacccctaaaatttcagctaattcactaaccgtcttttcaactgtcataacttcctcttttgtactgattttcttataaaagaatatcacaatcctaatctagtgtcaatttactgtcaacttaaagtgtcaaacaagacattttgacgtctatttctctatttatatgctagaataagattatgaagcattatgacacaataattataggtggtggacctgctggaatgatggcagctatttcctcaaatttttacggcaacaaaacacttcttattgagaaaaataaacgtttaggcaaaaaactagctggaacaggtggtggccgctgtaatgttaccaataatggaaaccttgatgagctcttagctggtatacctggaaatggccgtttcctatatagcgtcttctcacaatttgataaccatgatattattaacttctttcaagacaacggcgtcacactaaaagaagaagatcatgggcgtatgttccctactactgataaatctcgtactatcattaacgcccttgaaaataaaataaaagaacttggtggtcaaattatgactgacacagaagttgtctctgtcaaaaagataggagattcattctatatcaaaactaaagatacacagttcgcatccgataaacttatcgtaacaactggtggtaaatcctatccgtctacaggttctactggtttcggtcatgacattgctcgtcactttaaattagaagtcacagatatggaagccgccgaaagccctcttttaactgattttccccataaaaaactacaaggtatctccttagatgatgtcactttgtcatttgaaaagcatattattacacacgatcttctctttactcattttggattatcaggaccagcagccttgcgaatttctagctttgtcaaaggcggagaaactatatacctagatgttttgcccaatatctctgttaaagaattggaaatacacttccaaaatgaaagagaaaaatctttgaaaaacgctcttaaaatacttcttcctgagcgtttagctgaattttacgctgaagacttacccgaaaaagtaaaacaagtatctgtaaaagacttagaaatgttaattcaaaaacttaaaaaacttcctattttagtaactggcaagatgtctctagcaaaatcctttgtaacaaaagggggagttgatcttaaagaaataaaccccaaaacacttgaaagtaaaaaggtagctggtttacattttgctggtgaagtcctagacatcaatgctcatacgggagggtttaacattacttctgccttatgtacaggctgggtagctggtagcttacactattaatacatgaaagctgaacaattccgtcagcttttttatatagaatttaaagataatatttggctcttaaggcttctttgattttttccaattcatctggtaaatttacctgatgaatagcatacccaatctgataaggggatactataaaacgaggaacaattttacaaataagacccccatcatgcttatagaaaaagagattataagatttacagcgccctcccaagaattcatttaaaatataatgacacaaaattggtaaactatctgcaatcaaaatagcgttttccaatttggatactttaattgtgaactctgtgaaatcaagcataggacgattggcaatactaatctctgcttgttgactcgtttccgaacaaacctcgataccatcaaaccaatctaagttcaacgtttcataagcatctacgttttttaagccaacaatttggctatgaggatgtcgtaaacttccgccagataagggcccaaaatttcgataaagaacgaccgaacggtaatgaccactttcttccattaattgccattttgacaaaagataatctaacaattggcgcatctttgactcactataaactgaaatatccccattgtgatcatttgattcaatcaccaatgtttgataggtttcttctaaagttgggtatttattttctacccagatcatatcgtctttcacgtctaggatttttcctaattggcttttatcacaaaatggacatttgtctttattgctgggtttttgtttcgcgatattagggttaaatcggatatatctttcattcatactgttattgtaacacattcatcaccattacaatataatacttatccagttaacattttccttgcattcttagctgaaaagagtataatagaatcatgtcttgtttactggttaattaccagtaaactaggtaccctgttttgggatagaaaaatctttttgggaaaggagaaatcatggctaagaaatcaaaaattgctaaatttcaaaaacagcaaaaactcgtagaacaatatgctgaactacgtcgtgagttaaaagaaaagggtgattacgaagcacttcgtaaacttcctaaagattctaaccctaaccgacttaaaaatcgtgatttaatcgatggccgtcctcacgcttacatgcgtaaattcggtatgagtcgtattaacttccgtaacctagcttacaaaggccaaattcctggcattaaaaaagcaagctggtaattcgtgaagacaaatagttactttttatgactattctattgagtgtggacgaatagttaatacattgtaattatttaacctgttgagtatttactcagctattacaaacttcttcaaaattttattatcataggaatgtaggatctcatcaatccttaaatgactaataataaaagatgaaaaaatttttcttatctcaaatcatagatgccaatttatttattttcaaaaagcccggtatgccaagataccgagctttttattattataaatactgataaaattcttttagttaatcccaaaaacaagactattattttgtaatagtcactactgaataatatttcttttattaaaaactcacaagacatttcttaaagcagttacatcttcgcgactagttgaccaactagttgctagacgtattacagtatgatggtcatcatatttttcccaaaaactataagctacattctttgctaaatctgctagttttgtattttctacaataataaattgttgattagttggtgattttaaatagaatgagtaacctttttcttctaaaatgatttttaattcctctgctaagtcgatcgcatgctttccaatttttaagtaaaggttatccgtaaagaaacgatcaaaagcaagccccagcaatcttcccttggctaataacgcaccatgctgctttacaattgtagtaaactgttttggacgatttttctttgtgaaaacaactgcttccccagcaagagcccccattttggttccaccaatataaaaaacatctgataaggctgcaatcgttgggaaatcaacatctgtatctttcgcagccaaaccataccccagacgagcaccgtcaataaataaggggatttgataatgtttacaaatcttcgataactcttctagttctgctttactataaagtgttccatattctgttggatgtgatatataaaccattcctggaaaaaccatgtgttggtaattaccatcagcataaaaagtctcaatataagttgcgacttcgcttgcgagtaatttcccattatgagaaggtaaagtcaataccttatgccctgaaaattctatggctcctgcttcatgactactcacatgacctgtttctgcagcaataactccttcataagaagcaagcatactactgataactacttgatttgtttgagtaccacccactaaaaactcaacttcagcttgtggacaggaacagacttctcgaattttatctgccgcttgttgacagtaactatctgtcccatatcccgatagaccttgatcattagtttcaataagggcatttaaaagctctggatgagctcctttattataatcattttcaaaatgtaacattccttaactcctttattagttaaaaaaatagcgacaatatcatttgctaatatttttgaatattcaatcattataacaaataaaaaatatcaaaacaagcgttttgatattatgaacacctataaactctcaaaagctaaactaggtttggcattcaattttaaagaagcaaaattctctttttcaaactctatcgctgctgctaatgcaatcattcctgcattatccccacataatctaagaggaggaataaccacatcaatatcaggagaaatatcagtagccaagcgttcccgaagtccttgattagctgcaactccaccagcaacgactaaagttttcactggatactttagcaaagctttttgagttttggccaataaaatatccaaaacagccgcctgaaaggaagcacataaatcttcaagaaccaatgcttcacccttttgttctgcattatgatgtaaattgataaatgcagattttaatccagaaaaagaaaattcaagatgatcttctttgatcatcgctctaggaaaatggtaagtatcttgacccttatgagctaactgatcaatctcgcgacctgctggataagttaagcccataacacggcctactttatcataagcttctccaacagcatcatcccgagtttctcctactattttgtaatctcccggttcagaaacatatactaattctgtatgtcccccactgacaagcaaagctaacaatgggtattgaagttccttaacgtcacgtgctgccattaaatgacctgccatgtggtttataggaattagaggtaatttatttgcccaagcgaaagcttttgctgcagccatacctaccaataaggctcctactaatcccggaccatatgttacagcaacagcatccaaatcgctagcaacaatacctgcttcttgaagagcatcctcaaaacaggttgttactacttcaacgtgatgacggcttgccacttcaggaacaacaccaccaaaacgtttgtgactttcaacttgacttgcaataatattagctagtaactctttatcattttttaaaatagcaacactagtttcatcacatgaactttccactgctaaaatatatctatctttcataatgatattaatccatcaatatcgtcttttccattagtattgaggactattcatatcctttctatcatcaactatttatcccttgcgcatcactatagcatcttcaattggatcatggtaataatttttgcgctttcttaaaactacaaaaccacacctctcataaagtttttgtgctacgatatttgaataacgaacctcaagaaaaactggcacctctatatcagcgatcattgacattaactggtaagcataacctttaccttgataattttttttaacagcaatattagtaatttctacttcacctaccaattgttgaagagccaaaaaaccaatgacttcaccgtcattataaacaaaaaaataatctgttgaatctttttttaaatcttctgaaatctgcgataaactccacggagatttgtcatagacatcagatagtacgctccatatagccagtgcttgttctgatgattccatctcaaactctcttaatatattcttctgtattcgtttcacagtggttttttaaccaattttcctcagcttcaacacgttttaagtatcgtggaacaaacgcatctacattaacgcttttcattttttgtcctttgcgcccaattgctactgcacaaggtaaagtttctgtaattttagcatgtggtaaggctttcttaatctgatcaaaaaatgctgcaacctctccgacaaaatgaacattggctttattccccacctcttgtaagacttcttcaagagaagtgtgacagtctggtttaacagtatcaccattttgatagaaaccaacataaacattattacgtcgtgcatctataagtggtaccaataaatcattttctgaaaatccatttgttaaagcgtacaggctagatactccaactaagtcaatcttaagcgtataagctagcatttttgctgtagcaacagctacacgtaagcccgtataagatcctggaccctctgctactacgatacggtccaaatcttgaggttctaaatcaattgattgcattaaaaaatcaatggctggcatcaaattaatgctatgattctttttgatattgatagtgacagtcgctaaacattccatattgtttagtacagccactgatagtgctttgcttgaagtatcaaaggctaaaactttcatcatttaacttcccttacttgattctacctcttattttatgatataatcatgataattgcaacgaatcaaggttaattctattactctataaaaacttaataatggtttgtcattgtctcacttaacggcattgacccatttttttatagttagaaaaaccgagagataagaaaggattattatgatttataaagttttctatcaagaaacaaaagaacgcaacccacgtcgtgagcaaaccaaaacactttacgttactattgatgcagctaatgaattagaaggtcgcattgctgcacgtaaactagttgaagaaaatacagcttacaatatcgaattcatcgagttactttcagacaaacaccttgaatatgaaaaagaaactggtgttttcgagctcactgagttctagaaaggagttaaacataatagctagagtaatctacccattatgataaacttattatgtcaaatatcaacttaaaacccgaagaagttggggtttatgcgattggtggtctcggtgaaatcggaaaaaatacttacggtatcgaatatcaagacgaaattattattgtagacgctggtattaaattccctgaagatgatcttttgggaatagattatgttatcccagactattcatatatcgttgaaaacattgaccgtatcaaggcccttgttataactcatgggcacgaggaccacatcggtggtattccttttctattaaaacaagctaatttaccgatttatgcaggtcctctcgctcttgctctaatcaaaggtaagttagaagaacatggtttacttcgtgacgctacattatacgaaatccacgctaatacagagctgacttttaaaaacttaagcgttacatttttccgcactactcactccattcctgaaccattaggtattgttattcatacccctcaaggtaaggttatttgtacaggtgacttcaaatttgactttacacctgttggggagcccgctgacttacatcgtatggctgctctaggtgaagatggtgtcctctgccttttatcagactcgacaaatgctgaagttccaaccttcactaattccgaaaaaattgttgggcaatctattatgaagattatcgaaggtatcgagggacgtattattttcgcctcttttgcttcaaacatcttccgactccaacaggctgctgaagctgctgttaaaactggtcgtaaaattgctgtttttggacggtcaatggaaaaggcaattgttaacggtattgaacttggctatattaaagttccaaaaggtaccttcattgagccaagcgaacttaaaaatcttcatgctagtgaagttttaattatgtgtacaggtagtcaaggtgagtctatggcagcacttgctcgtatcgctaatggtactcatcgtcaagttactttgcagcctggtgatactgtgattttctcatcaagcccaatccctggtaatacaacaagtgtcaataaattaatcaataccattcaagaagctggtgtcgatgttattcatggtaaaattaacaatatccatacctccggccatggtggtcaacaagaacaaaaattaatgttacgcttgattaaaccaaagtatttcatgcccgtacacggtgagtatcgcatgcaaaaagtccatgctggtttagcagttgacacaggtattcctaaagagaatatcttcattatggaaaacggtgatgttttagctttaacgagcgactctgctcgtattgctggacatttcaatgctcaagatatctacgttgatgggaatggtattggcgatattggtgcggcagttctacgtgaccgccacgacttatctgaagatggtgttgtccttgccgttgctaccgttgatttcgattcaaaaatgattttagctggaccagacatccttagccgaggctttatctatatgagagaatctggggaccttattcgcgaaagccaacatatcttattcaatgctattcgtattgcactgaaaaataaagatgcaagtatccaatcagtaaatggagctattgttaatgccttacgcccattcttatatgaaaaaactgagcgtgagcctatcattattcctatggtccttacccctgataaataaacaaaagaacggaaaatactttctccgttctttttaattgcctatattagcaaaataagttaatatatcaaattacttctgggataactatagaatataaaagaactccaaacagtatcgtacttttataccgtctatgtgaggagttctttatagattaattcggataaatgtagctaactacccctggtgttactgtattttgtggatcaaaccaaccacgataattatcaatccattgatgacctgcataattagattctaaaacctgaattttattagtgacaggatctacagctgtaacataagccacatgtccataactaccatcagtccaacatacgatagaacccacgcgcggttgtgtccctactgtataatcagctgatgcggcgctcgcagcccaatcaccaccgtttccccaccagttacctgcccatgttgccatctcctttacaccccatgtgcattgacctagtggaaacgtattactagctggatgtgcttgagcaatttcctccgcacttgctaggtagtctacatctactgcatagttatatgtattcgcatctgcatttgttgaagcaaatgaaaaagcggacaccaaagccactgttccaagcattgttttagactttaattgttttatgttcatgttttcctccatctgatgactcctagtttatcaaatccatataacagacaaatgaaaacctgtaacaagttttaggcaattttttacaataatttacaaaaaaactagttttagactttacaaaataaagcctaaaactagttataaacattcttatgattaatataaatctaggtaattatcaatttcccattgtgaaacataagtcgcataacttgcccattcaatacgcttagcgtctaagaaattagtatagatatgagttcctagggccgcttttaccacttcatcttcttcaagtgcttcaagagcattatgaagagtagatggtaaatcaacaatacctgcttgacgacgttcttctacagtcatagcatagatatttgtctcaattggttctggtgcttcaattttattctcgattccctcaagtcctgatcccaaaagtactgataaagcaagataaggatttgctgttgggtcaaccgagcgcaattctaggcgtgttcccatacctcgagatgcaggtacacgaataagtggcgaacgattgcgacctgcccaagcaacgtaaactggtgcttcgtatcctggtaccaaacgtttataagaattaacagttggattaatgatagctgtgtaattgtaagcgtgtttcattaacccacctaaaaagtagtaggcatcctctgataattgcattccacgtggatcttctggatcaaagaaagcattgttcccttcattatcaaaaagagacatattacaatgcatacctgaaccattgataccaaacttaggttttgccataaaagtagcatataaaccatgcttacgagcaattgttttaacaaccaatttaaataattgaatgttgtcacaggcttttaaaacatcatcatatttaaagtcaatttcatgctgtccaactgctacttcatgatgactagcttcaacttcaaagcccatttgtgttaagacattaacaatttcacgacgtgtattatctgctaagtctgttggagctaagtcaaagtagcctcctttgtcattaacatcaagtgttgggttaccattttcatccattttaaataggaaaaattcaggttctggtcctaagttaaatgacttatagcccatctcttgcatacgtttcatattacgcttaagatttccacgtggatctccggcaaaaggttctccttctgctgtatagatatcacagattagacctgcaacagctccattttcatctccccaaggaaagacaatccaagtatctaaatcaggatataaatacatatcagattcattgatacgaacaaagccctcaatagaagatccatcaaacattgctttatttgataaaactttgtctaattgttcatctgtagccggaatttcgacatttttcattactcctaagatatctgtgaacatcaaacggaggaaggtaacatttttttccttaacttcgcgacgaatatcttctgctgtgatagtcatatagtctccttaatatctagcttgactgcatgtttacaaatgcatatttccaatgtgctgtgaaggacttgaaaaacgcccttgattacggagctcatcttgtaaaagtcgacgaacctcggcatctgataatgacttttgtttctctttggacttatgttgtctttgcatgtattcatttttaatatcagaaatatgcaaaccatcgctaatgaagtcttttatttccagtaagcggtccatatcattcagtgaaaacatgcggcggttaccttcagtacgttcaggtgtgattaacccttgatcctcataatagcgaatttgtctggcagtcaaatctgtcaacttcataacagctccaatcgggaatacagccattgtacgcctaagttctctttctttcatgatggcctcctttcattaaaccattataaactttaaaaagtttgatgtcaactctcatgtgagattttatgacatcaaactataatttgttattttttagttttttccgaagtatttcaatatctgtattaaccatcattgcaataaaaacaccacaaaaagtttcaaaaatacgtgcaaaaacatatagaattgtctctccgcttgggatagataaagttataataagtaatgcggctgttcccccaataatacctgatttattattacaagcaacattaatcatgatacataacatggtacaaataggaacaattaataaagtgacccaaaaagcttgatgaaatatctcattgaatgcaaaaaatactaaggagagtaagccacctatactattaccaataattctagaaaaaccaaagtgcacgcttttatcaaagtcttctcttaaactaaatacagcagttagagcaccaatttgaagccctttccaaccaaataaatgaaaaaccaataaaactaaaaagaccgataagcctgttttaaatgttctcattcccaatttaaactttttaatatcaaacttgtaattagataataatttttttaacgttttcatacctatcccttcactatatattctaacatatcaatccataaaaccctttttgtaaacgttttatttattactagtatatcttttataaaccaatttatatcaaatcgtcataaacttttgaaaattgcagtgtcaaccaaataccactatatctaaaaactagtaaatgataaatgaagtcaaggaaagttcaataactctacattatcaactaaaaaaagacatgcatcagcatgtcctttaatataaattataatgactattatttttcagtcaatgctgccaaacctggtaatactttaccttcgagcaattccatgcttgctccaccaccagtagagatccatgagaatttgtcagcacggccaaggttgatagcagctgctgctgaatcaccaccaccgatgattgatttaacgcctggttgtttaacgatagcgtccattacaccgattgtaccagcttggaagtcagggttttcaaagacacccataggtccgttccatacaactgttttagcaccagtaagtgcttcatcaaatttagcgattgatttaggaccgatgtcaagaccaaggaacccttctgaaactgcttcaccttcagtgtcgcgaacttcagtataaccagcaaatgcgtttgcttcttttgagtcaactggcaagatcaatttaccgtttgatttttcaaggaggtctttagcaacatccaatttgtcttcttctacaagtgagttaccgatttcgataccttgagctttgtagaatgtgtaagtcataccaccaccgataagaactttatcagctttttcaagaaggttttcgataacaccaatcttatcagaaacttttgagccaccaagaatagctacgaatgggcgttctggagtttcaactgcttcttggatgtaagcaatttcgttttcaagaaggaaaccagctacagctttttcaacgtttgctgaaatacctacgtttgatgcatgagcacggtgtgctgtaccaaatgcatcgttaacgaagattccatctccaagtgaagcccagtatttaccaagttcttcgtcattcttagattctttcttaccgtcaacatcttcaaaacgagtgttttcaaccaaaagaacttgtccatcttccaaagcattgattgcttcttctaattttgcaccacgagtaacacctgggaatacaacatcttgaccaagtttagcagctaaatcagcagctaccggtgcaagtgattttccttctttgtcagcttcttctttaacacgtccaaggtgagagaagaggatagcacgaccaccttgttcgatgatatacttgattgttggaagagccgcagtgatacggttgtcgttagtgataacgccgtctttcaaaggcacattaaagtcaacacgaacgaggacttttttacctttcaaatcaacgtctttaacagtcaatttagccattagtaaaactccttatataatttgatattatttattataacatatttttgtgaacagttgtaattattgattactttttcacaaatagatttcatagattttcctagttgttttcaagagaattcgtatacttattaatcatacgaatgcaacattttttgtcgttctttcaattgtttttgaacatccagatgttttccttgataaatagcactttcccaagaaccgtacataggatttgggaaaacaataaatttactaccaaactcactttgaagtttagttagtagttgttctctatctgtactagatgatttagaaaaatcagcaaaatcaactaaattatctccaaaaagcataattaaattggtatctttttgaactgcctgacggcgactctctttagatttcattccttttttaaggaaaagcaagtggtctttcccttgaacaggtataccttccttctctaaattttctttagtcgcatcaacttgagcatctgtacgatctgagacataataaatttttattcccttttcattagcatacttcaaaaattctttggcacccgcaacagccttagctgatttcttttgcacccatttatcccaactctctggcgtgaaactagagccatctttaatattctttgcttgatatgggctattatctaaaactgtttcatctaaatctaagataattgaatatggtttttcactgggcttttgtaaccaatcatctaacttcattttagcaacattataaccttgtaaatataaagccttggcttctgcagaattttgataccaaaggacagacatagtgttttccttagccaacagtttattagaacttagagaaatatttttaaatttcgtcttttgctccaccttatctggagacatatcagcttttttagtactgtggtttgactgacatgctgtcatcataaatacagcaacagataacgataaaactgaaaaaacttttgtagtcttcataaaacttctcctctatattttttcaattaaatcataccactgcttactttcaaaatcaaaccttattttaacttatagtcaatataattcatttttcatttattttctgataattttctataataaaatgaaaaaacattcgtattattttttatttataaaaataaaagagggataaatccctcttttacatcatattaattaaaaattattttgcaatttttgcaaagtattcaagtgtacgaacaagttgtgaagtgtatgacatttcgttatcgtaccatgaaacaactttaaccaattggttaccgtcaacagtttgaactttagtttgagtagcatcaaacaatgaaccgtatgaaataccaacgatatcagatgatacgattggatcttcagtataaccgtatgaatcgttagctgctgctttcatagctgcatttacttcttcgacagttacgtctttttcaagagttgcaaccaattcagttactgatccagttggaacaggaacacgttgtgcagcaccatcaagtttaccgttcaattctgggataacaagtccgatagcttttgcagcaccagttgagttaggaacgatgtttgcagcacctgcacgagcacgacgaaggtcaccaccacggtgtggtccgtcaaggatcatttggtcaccagtgtatgcgtggatagtagtcatcaaaccttgtttaacaccaaagttgtcttgtaaagctttagccattggagcaagacagtttgtagtacatgaagcacctgagataactgtttcagttccatcaaggatatcgtggttagtgttgaaaacaactgttttaacgtcgtttccaccaggagctgtgataacaacttttttagcaccattttcatggatgtgttgttcagctttttcttttgatgcaaagaaaccagttgcttcaagaacgatttctacgccatcagtagcccagtcaatgtttgctggttcgcgttcagcagaaactttaacaaattgaccgttaacttcgaatccaccttctttaacttcaacagtaccgtcgaaacgaccttgagttgtgtcatatttcaacaagtgtgcaagcatgtttggatctgtaaggtcgttgatacgagtaacttcaacaccttctacgttttggatgcgacggaatgcaagacgaccgatacgaccgaaaccgttaataccaactttaactaccattagtgatttcctccttatgaaaatctcaaatattttattttagggatccccctaaccaatgtgaaaagattaacttgtacatatgtgcaaaaatctttcaacacaattattatatcttttttcgagaaaaattgcaatgaatttaccactttcaaaaagaaaaaaagatactctttcgagtacctttcataagttttcagaaattattcaccagagtttttcttgatgatttcttcttgaactgacttaggaacatcttcgtagtggtcaaataccatcatgaatgtgccacgtccttgtgttgcagaacgaagaactgttgcataaccaaacatttcagcaagtggaacaaaggcacgaacaacttgtgtattaccacgtgcttccataccatcaacacgaccgcgacgtgcagtcacgtgacccataacgtcaccaagattgtcttctggagctgtaattgtaacaagcatcattggctcaaggatagctggttgcgctgatttagcagcttctttaagtgcaagtgatgcagcaatcttgaaggctgtctcagatgagtcaacatcatggtatgaaccatcgtaaagtttagcttttacgtcaaccattggatatccagcaagaacaccgtttgccatagattctacaagtcctttttcaacggctggaataaattcacgaggaaccacaccaccgacgatagcattttcgaattcgaatcctttaccttcttcgtttggtgtaaattcaatccaaacatcaccaaattgacctttaccaccagattggcgtttgaagaatccacgtgcttgtgtagaagcgcggaatgtttcgcggtatgatacttgaggtgcaccaacgtttgcttcaactttgaattcacgtttcatacggtcaacaaggacatcaaggtgaagttcacccattcctgagataactgtttcaccagtttcaacgttagtttcaacgcggaacgttggatcttcttcagcaagtttttgaagggcgatacccattttatcttggtcagctttagattttggctcaaccatcaattggataactggttctggaacttcaattgattcaagaataacttttgatttttcatcagtcaatgaatcacctgtagttgtatctttcaaaccaacagccgctgcgatatccccagcataaacagtttcaatttcttgacgactatttgcgtgcatttgtaagatacgtccgatacgttcacgtttacctttagatgtattcaacacgtatgaacctgaattaagaacacctgagtacacacggaagaatgttaagcgacccacgaaaggatctgtcatgatcttgaaggcaagcgctgcaaatggctcttcatctgaagcaggacgtgtttcttcttcgtcagtatcagggttaatacctttgattgcaggaatatcaagtgggcttggaaggtaatcaataacagcatcaagcatcaattgaacacctttattcttgaaggctgaaccacacaatacagggtagaattcaacattgatagttgctttacgaatagcagccatcaactcttcgttagtgatttcttcaccttcaaggtatttcatcatcaaatcttcatcagtatcagcaactgcttctactaatttttcacgatattcatttgcttgatcaacatactctgctggaatatcttcttcaaggatatctgtaccaaggtcattagtatagatttcagctttcattttgattaagtcaataataccacggaaatcgtcttctgaaccaattggcaattgaattgggtgtgcattcgcttgaagacggtcatgaagtgattgtactgaatagaggaagtcagcaccgattttatccattttattagcaaaaacgatacgtggaactccgtattctgttgcttgacgccaaactgtttcagtttgaggttctacacctgattgagcatcaagaactgttaccgcaccatcaagtacgcgaagtgaacgttgaacttcaattgtgaagtccacgtgtcctggtgtatcgatgatgttaacacggtgaccatcccattgtgctgttgttgcagctgatgtaattgtgataccacgttcttgttcttgttccatccagtccatttgtgaagcaccttcgtgtgtttcaccgattttgtggattttaccagtatagtaaagaatacgctcagttgttgttgttttaccagcatcgacgtgagccatgataccgatattacgagttttttcaagtgaaaattcgcgagccatttggtttctcctatattttaaattatttacttctttattataacactatttataaaaaacggataggcaggacctacccgttctaattgctaacattgctatctaccaaacaatttgtttagtagctatgataagtctcaaaaagagagtaatcttaccaacggaagtgtgcaaaggcacggttagcttcagccattttgtgagtatcttcacgtttcttaactgatgctcctgtgttgtttgcagcatccatgatttcttttgcaagacgatctttcatagtgtgttcaccacgagcacgtgatgcgttaaccaaccaacgaagtcctaaagttgtacgacgttctggacgaacttcgacaggaacttggtagtttgatccaccaacacggcgtgcacgtacctcaaggacaggcatgatgttttccatagctgtttcgaacacttcaagagcatctgttccagtagcttctttaattgcttcaaaagcatcatatacgatagttgcagcagtaccacgtttaccatcaagcattacacggttgataagacgtgtaacgatttttgagttatacaatggatctggcaatacttcgcgtttaggcgcttgatttttacgactcattttctcttatcccccttctaattaccctttaggacgtttagcaccgtatttagaacggccttgtttacgatcagctacacctgcagtatcaagtgcaccacgaacgatatggtaacgtacccctggaaggtcttttacacgtccaccacggataagcacaacactgtgttcttgcaagttgtgtccgatacctggaatgtaagcagtaacttcaataaggttgctcaaacgtacacgagcaaatttacgaagggcagagttaggttttttaggtgtcatagttccaacacgagttgcaacaccacgtttttgtggtgcagataatttagtgtgaacttttctgtgactgttgtaaccaatattcaaagcaggtgaatctgatttttcaactttagatttacgtggtttacgtaccaactggttaattgtaggcatctacatttctcctgtaagttttttatttttggttgatatagcacttggtgacagcctatatctgcgtgtacttttgcaacaattgtcagcacgtctctgtacacttttgagagaccaaaagtaaaagtaccgtttatcatagtatcattttacacataatgtgtcaagcttttattacttttacaagcaaaaagaatcaaggatgtcaccttgactctttaatcaaatatattccccgcttctacagagactctattattttttacatcaatttcagatactctcagaagagatttataggccatcttctcacgttgttcctgagcattttctgcaaatacagcgacacctactaatgtgctatcgaattctgagagtaaactaatcatccccgaaacagtacctccacctttcaagaaatcatcaactattaaaactcgactgttaggttttaagctacgcttagaaagaaacattttttcaatacggccacttgaaccactagcgtagtttactgacacagtagaaccttccgtaatcttcaaatcacgtctcacaataacaaaaggaacatctaaaacatttgctactgcgtttgctaaaggaacaccttttgttgcaaccgtcatgacagcatcaattttttgacctctgtaagcgttcgctataatgcgaccaatactttgtaacatttttggtgtactgagtagatctgaaagataaatgtaacctcccggaagaatacgatcgttttcagataaacgctgtcttaattcttcaacgatttctttcgcttctgcttcagcaatagttggtgtaaagataacacctccacttgcaccagtcacagttttaatatctccgatttgagcttgttcaaaagcttttttgataatagcaatatcttctgaaatcgaagatttcgcggcaccgtatttactagcaaatgtatttaaactagttaatgtatagggattatttattaggtaatttgaaataacaaccatgcgttcgctacgtcttaatttcatattttctccttattcatagcattctttacatatagtataacataacaaatgctaaaaacgaacattttattttaggtcttaattattctacctaaattatttaatgttcggtttataaaaagaacggttatccatggcaaaaatgcgatttgtcatttcaccttcgttgacacggtttaaagctgttgtcatcatcatcatatttgcatcaatgttatcgatcatatggataatttctgcctccatgattctaggacgaaccgggcttccatattctaattgtccatgatgactcagaataacatggcgtaacactgtaacctcttcttttgtatcatcaatattaagctctgctagtatttttgttaattcctcatcaataagtgaaatatgaccgataagattacctcgaatagtatattctgtattatcaggacccgataactcaatgaccttggctaaatcatgtagcataataccagcaaacatcaaacttttattaagttctggatagatatctccgatactatctgccaaacgaaccattgttgccgtgtgatatgccaatcctgattcaaaagcgtggtggtttgttttggcggctggataggtaaaaaattccttattgtatttacgataaagtgctcttaccacacgctgccaggttgcattttcaattttaaagagcatttgttccatgtactctctcacgttgtcaacattgattggaggtttttctttaaaatctctaggatcattaggttcaccatctttgatgtttcttaatgtaatttggttgacttggggagttccattataaacttcacgacgccctttcatatgaacaattttaccggctacaaactcttctacattataggtctgtgcatcccacatatttcctgaaatttcgccagtatcatcttgaaaggtaaaggcaataaagtctttacctgcacgcgttttacgaacttctgctttctttataaggtaaaacccctcaaaaagctcgtcttttttcatttggttaattttcattaatttcctcttcttctgttataggaaggtttaacaagctagtggttgcttgatcttgatgttcttcaactgtatttaagactctgataatagcgtttgtccgcgttgtgagtaaactatcaatacttttacttgctgtatttaattgtttttgagcttttgataacatgccaccaaattttccaaattcaaccttgacattccctaaaattttactaatatcattagcattcttttgaatatttaaggttttaaagccaacagataatgaatttagtaaagcagataaggttgacggtccagctactacaatattttcgtcacgtcttagactatcaaagaatgttgcatttcttaccacttcagaatagagcccttcagttggtaagaacatgataccaaaatttgtcgtttcaggaggatttaagtacttattgtttatatcttttgcaaatttacgaatacttgccagtaaagatttacgatagagttctatttgaaccttgtcacccaattcataagcatcttccaatcggtaataatcttctagaggaaacttagagtcaataggcaaatagatataatctccctgaccatttccaggtaatttaatagcatattcaacacgctcagaagagccagacaccgtaggaaattctctctcatattgactaactgtcataatatcttctataatttggccgagttgtaactcccctaatattccccttgtcttagtatttgacaagactttgttcagtgtaccaacatcttgggcaacagttttcatctccccaagaccttgattgacgctctctagttgacgcgatacagtttcaaaagaagtttgcaaacgcgtttgtagcgttttttctagcttttcctcaacagtttggcgcatttgatccaagcgtttttcattggaatcttgcattttctgaactgactgagataaattggagttaatcaattccaagcgtttgtctgatcgatctcgactctccgttaaatgctgatttaattctgtacgcatatcggtaagcaactgataaatttcctgttgcatacggtttagctgattagtcaacgttagaatttgatctttttgcgccacttctatctgatatgtcagttggtctgatagattatcagcattatcttcaagttgtttttcaacggactttgttaattccgtcattttttggtaagaaattatcgtcactgtcagactagctagtacaatgatcaaaatgatgacaagcatattaacctctatccttactataaataatgattaagtaaccatctttgagctctacttcaattggcgaagtcataaattcattactggaatacatttttttcttaaaataattacttttgttcaattcatatttagccccagaaatctgcaaagtagactcactctcaggcatgaacgagacataggacatcccttcaatccttgagacttgatttttcccggatggtagataagtcactatgttttgttcatctttgagtctgatttgtgacataaatggttctagatctctgtcacttggtaaaaagatattagacatcatatggtcaatcctgccaccaaatgctccaaatacggtcacctgagcttctggaaattctttgaaaatagtttttaaagctaattctgtatctgtatcatttttttctgcactagcagaaacgatattgctacaatagtgtttgatataaagcagttcatcttctgttatagaatcaaaatcacccactgccatgtccaaagaaagcccattttttaataaaaataggcttccacggtcaattccgacaaaatagtcaaaatcatattcaaaataagttaagtcaccgccagcaaataaagcaattttagtcatcgagcgccacccttaaggtttctacttgtgcaggtaaatcacttgctttaaagagataagaacctgcaacaaagacatttgcaccagcctctgctgctgccttaattgtagtattatctataccgccatcaacttcaatatcataatgatgaccgtactctttgcgccatgctgcaactgtctttacttttgacatcatttctggaataaaggcttgtccaccaaagccaggattaacagtcataattaaaatctggtcaaccaaatctaagataggaataagagattctacgggtgttcctgggttaataaccacacctgctttcattcctgcctcttttatcttttgaagcgcaccatgtatatgtttcgttgcttcaacatgaatggtcatgatatcagcaccagcttgagcaaaagcctcaatataacgttctggatcaacaaccatcagatgacaatcaaaaacaagtttactgtgtttacgcatgctggatacaacatccgcaccaaaactaatattagggacaaattgaccatccatgatatcaatatgaacgtattctgctgttgtctcttcaatacgtttcaattcgttagcaaaattagcatagtctgctgctaatatcgatggggcaattttattggttgacatagaaacctactttcttttaataactttcttatatgtttcacgacggctctcaatttcacttaaaaattggaggtagttatcatagcggacttgccataactgaccttgagttaaggcttcttttacagcacatttaggctcatgtgtatgcgtacacgagcggaatttacaaaaatgactaagtctacgaagctctggaaaggattcgtttaagtcctctgcattatccacttcatagtccaaagaagaaaaaccaggagtgtctgcaatttttcctttatgaacgttatagaaactaactgctcttgtggtgtgtcggccacggcctaaactacccgaaatttcaccagtttcaagtttcaactcaggagcaattttgttgagaagcgttgattttccgacacctgtctggcccataaaaacagtcactttatttgctaacagaggcaagagttcctcttgagaataacagaaaacgtagcctatattctgataatgttcgcgaatatcatcaataacaaccaaatcgtctaacaaatccaacttggaaatataaatgataggctgaatcatcttatattctagaagtactaagaaccggtctaataagttagcgttaaaatcaggttctttagcagacatgataacgacagcttgatcaatattaacaataggtggtcgtacgaggctatttttacgctcttcaattgatagaatatatccttctgattgatcttgcgaagaaaattcaacccaatccccaacgtagggaatttgacctttttttctaaaatttccacgcgcacgtgtctgataaacaacaccgtcagattccacataataaaaacctgctagcgacttgacaattctaccttgcaattgttctccttaattgtttagaataccactattatatcataaaatgagaaataagctctactctcagagataagctaaatagaaactatttgtaggtgttcgatttctctcaaataacctcaattttatgaattcccaacataaaagcagtgatcttatttagatacactgcgcttttttccaattactattaaggcacctactgtaatttctgatatactcgcccaatcaatagtcgttttatctacgctgaataacaacggtgtcatatcaataaaagcttgacgttcttgttgagaacagttatagctttgaacaactttctgctcagaaataatttcaaaattttctctaaagtgatctagaattttttgattagagtaatctttctgtttcaagtattgactagctttttctcgcaattcttgaacatgttcagctacaggaacaacctttacaaggataccatcatcactcagcacccgcctaaattctttataatttgcaggagaaaaaatgtctaaaatgatatcaattgatgagtcttgaataggaaggttagctaaatcagaaacaaaccatttcacaagcctagactgatcacttttagcagctaattgaatcgaatctttagaaatatcaaaagccaagaaagtcttctcatgcttgttaactaattgacgagaataaaagccctctccacaaccaatatctaaaaccgaatgaaactgagaattattttccaaaacctttgaaatagcttctaaaatatgattataatacccgttttctaagacaagctgccgattttcaaatgattttttatcataatgttcatctaccttctttcctccaagaagattaacatatccaaatttggataaatcaaaacaatgattatcagagcatttgaggctattactttcttttatcaagggattttgacatttaggacaagcgaaataacttgcactatcttcaaaacgccacttcttgtcaaccaacatagtttatatcccaacctctttcaaggcatctgctaaacttgcaaaatcagggatagataaggcttctccgcgaatagatggcttaatttttgctatttctaatgctttttccaattttgctttagtatcttctgattttccaaaatgactcgttagattattccaaagtgttttacgacgatgtacgaaggctacttttgacactctgaaaaagaaatcctcatcttgaacactcactactggttgatctctacggaccattttcaaaatagctgaatctacatttggagcaggaacaaaaacagttctcggaacgataaatgatactttggcagtcatataatactgcactgcgattgacaaagaaccgtatgctttagtatttggcatagctgaaatacgatctgccacttctttttgtatcatgaccacaaactccgcaaaaggaatcttgctctcaatcaagtgcataaggattggtgttgtgatgtagtaaggtaggtttgcgaccaccttgataggcagatcaggattcttgaaagcctgaatctgggtctgcaaatcagccttgaggatatcctgattgaccacttggacattgtcaaaacgcgcaagcgtatcagcaaggataggaatgagacgatcatcaatctcaaaagccataacctcagctgcattctcagccaaaaactctgtcaaagccccgataccaggaccaatctcaatcacgttgacacccttgtcaatctctgccgtgtcaacaatcttctgtaaaatattagtatcggtcaaaaagttctgaccgaatgatttcttaaatgtaaacccatgacgctccaaaatagcgcgggtaacggttttatctgcgattctcataattcctctatttcttaatattgatcatttttgaaataacatttgaggctatttgtgatattacaactggattataccactacttccttttgcctttactattctgagttataaacttatttttaattgcagttgcacaagcttcggttagtggtcctcctattgcttgcttataattaaatccaatcaactgcattgtttttaaagtatctttattcaataatgtaaccaattgtttcattgttcgttcctgttcctcatttagaccagaaaaattatataacaatgagattccttgctcgagagtattggatagatattcaatatcctcatcatctatattaattttttcatactcttctttatatgactgtgcaatgcgaattgcttgctcccgttcagctaataattcgttaattaaatcatcataagtagctctcaatgttgcagcatcttttacatcctttattgattgaattttactggttaccatagttgcagtccctttgactgcaagcgttgctaaatctaccccagctctagtcaatgcttccgttacattatactccactatttttctccttttctattaatacccctccatacactcttcaacttctgccttggtcactccgaagagtctgaggcgtttgaggagttgtttaccatttgagtagccgatacggagttgattcccaagatactcacggcgttttcggctatcgctagcagtaatgaatccccaacgaatgaggtctgcttgggtgatatcgaaatgatcttcatcatcgaaatgctgagtcacttttgagagtgccttctgcaaatcttcaaagctggcatgctcgacacccagagatcgtcccttggtctttgagcctggctttgcctcgtctcgattgaggaaggcatggcggactgtcggaatggcattcatgatgattttacggatacgctcgccattataatctgggtctgtaaagacgataactccccgcaaattgtgcaaacgttcgatacgctctaaatcatcttcatcaattgctgaacctctagtttcataggtatcaacattgtaaaagcgtcgcagattagcagtatcatctttcccttcgacaacgatcacttcttgaatatcaatttttttcatcaagtctaaatatccttactgcattttggtatgtagcctccgctacctcttccacagttatgcctcgtagctctgctattttttcaacgacatatctcgtataagcggttttgttttctcgacctcttttaggtacaggagccaaataaggagcatctgtttccactaatatcttatctaatggcaactctcgtgcagcttcttgtacatctaatgccttcttaaaggtcacaacaccagaaaaggaaatcatcatccctaaatcaataaatttctgagccatttccaaagaaccagaaaaagagtgcattataccaccaaaaggcccaactccagattccttaatgacttcataagtgtcttctaacgcatcacgtgtatgaacgacaaaaggaaggttatactcttttgaaagttcaatttgacgcttaaacacctcgatctgaatatctttgggatcctccatccaataataatccagaccaatttcaccaagtgcaataaccttgggattttctaaatgactgataatcattgactcaatattatcatcataagaaccagcttcagttggatgccatcctattgtgctatatacctgtgcatattgggaagataattccaaagattttgaaatggtatcttggtcaaagccgacaacattcatttttgtaacaccgagttcgctagctaaattaatttcctcgtctatctttccttcaaaattttctacgttaaggtgggtatgggtatcaaatatttttatcatatcatcgttctttctttgcttatcgtagctacaagcattaatctttattattataacataagactgaagcattctgatcagaaagagtaaatcaaaaaagtcaaaacatttttgctctgacttttgaatacttgctgtaaaaatcctctacaagtgtctagctaatggtagagaaactagactataaatgattatatttttgctgattgctttcaatagcctcctcaacctttgaacgaaattctccttttattgcctcgtccaattgattagcaactttatgaatagctgtctttgtgttgatggctacttcgtctatttctttatgatgcgacgtaataatatcgtgaaacttagatctcttgcgtggcgcgtacacgctatgtatcaattctttatccaattgtttttttaaagtccttactgactccttaccagtcaggacatcccacattaaactcaataatttctcctacttcattaattctcttttcttttccctttgcaactcttcaaaggttagttcatgttctgaacgttgccgaatatagttagctctatattcttcttcttgagcggacaaggcatagtactctttatggtaagcttgctctaagtcgtcatgataagaatctaaaatacgattgagcgtcatcatatctgagctatcattactatatctcaaatcatattcaacagcgtcgtaagtttcttgaagcatattaataatcttattttttcttactgagagatcgtctaatttttcttcaaactggcaacaactatggtgataggcatcatctaaatctgatatttttctctgagtatcagctaattgtttttcaatgatatcaatcagtgccattgtttaaactcccctgacaagttactatcttgtcgcaacatagcttcaactcctttattaatttggttttctaattcaacgtaagcgtgagaaatgctttctgccgcttgagttttatttgagaaaaaggtttgagcttctccgacaatgctcgcatagctaacacctgactgagcatacgcttcttccaattcttgaggacttagttcagtaactcctgtaggagctacttttaaagattgataaagctcttctgctttagcaactgctttttgctcaacttttttaacttcttcaactgcttcttttgatatcgttaccaaaccactagagatcacttttgcttgttgactatctaggaaaatagcttgattcttactaacttcttttcccgtacttttaaagctactaagtttcgctttaatagcatgcattctttgattcacattcgtatgaactactgaatagttttctttgtaagcaaatttatcttctgctaattttaaagaaccatctggattgtactggtagcctccccaaatatgctgattggtaaaattagcaacccagctacctcctgaaacagctttactgtcaactattttaacaattccgacagcattatcgcttccttctttaggataacctattccaattttatccttggaatcaacgtaattattgaccaccccttttattttatcaacctgttctttttgtttatctgtcaaaatactataaaggtttggaccgttatatatccaagctccttgaactcggtaaatttgattatcatccaattctgcaatagcatactgtgcattcattgaccctaacgagtgtccgtagaccgaaatttttgcgttaggatatttattcataacttcttttagcagatgagctgattgttctaactgctttgtaccttgtttatgagatacactttgtgaaccaaatttctttaataatagtttactagctattggaatatcatttttaaaccagtctgttttccaatcatcccctccaaacggtgctgttgaccccttaaataaaaccgtaacttccttaacatcctctggcttgtctaaagttccatttggagtgatggtataaatttgttccccggtttctttgcctccatcttgaacgtgagcaactttaccgatggggagtaccttatcttggctcattattttgactagtgtatcaagttggctacctaattcatactcttgcttcgctatatttaccctatctaaatcagtcaagactttttccattaatgacctctactttccaataaatgagttaactggggagattgatggctactttgactgaccaaatgcccttgattatccctatccaaattacaagtaatatataagttaggatctttattaatgattaaccttaccgaaatccctcccataggattttttttgatactttctttgtcaatatcatacgacttaataacagcattctctttgaaagcatcttcatcttctgcataaatccacttttgataagcatttttagcgtctttgctattagctatttcccataattcttgttgtttattgttttcagtcacttttaaacctcctacagtgaaaccaagccctaaaaggattattacaataaaactaagtaattttattgacttcatctctcctccttttatcatataacactcatttgatatctagtttatcataaatttattctcattataaatgaaaaactataaaacatggattagttatcttaggattaccaaatacaaagatattaaaaaagatgattaatagctctaatgctataaatcatctgactctactatttacttgtaatcacttggacgtcctgtatattttgcccaagatttcttcaaaaatttattattaatgtgataattcggcttgctgttttcctctgttaaaaatggattgatatgcttatctagctctaaccaaccattccaacctaaatggattgtatcttgcataaagtatggcttacctccatctcgagaaaggtcagcgatatgattgaaaccttgactttgaagttggtgttttattttttctacagatttttgatacattttttgatcaagccctgtgtagtctgtccactttttatttactggtggtatgacaaaaaggacatctgtattttgttttgagaattcattaagaaccaactgtaaatcattaaattctggtgacttagtataattgaaatgtcgttgtgaccctttcaatttttttaagtgctttttaattcttgtttggtaaaagcgatcatcaataccaaattgatttgatctcgttgctactttagcatcttgtgatgcaatacgcgataaatgattatatgagaatgctttcggtaatttaccaacatgaggcattattgcctgattataagtttttcctagtggtagatagctaaaaatagcatctgtcttctcaaatacccaatcattaaactttagtctttgtttgtctttatttgatagtttttggccatctgcaactttttctatcaaatctgacatagaagcttcaggatataattttaacaatcgacgagcagcatacctatcgtaggttgtccctgtttgattttgcaaaaatcgaatggtttgatcgttgctgaaatagttttgaaaagcacctttgttggctcccttgcgaacaaaccattgcggagaaataacatagatagcttttttatttttgatttgtcctttaatctgttgaatgccatagtattgtgtcagagaagccgcccctttttgacctaaaagatatgggatataagacctattgtaagcctctgctaaaactgatggatgcattgcgtcaaatcttagccactcacttgaaccaaagaaagggacaaaattggctttaggatcactgaaagctctaactttttgaactctgcttttaaaacctgccttcgtcaacgctactgcactgtttttttccttacctaaatgatgaggctgagaaacaggaaaaacaaaatataatcctaccaacaatagtaaagcacaaactagaggtccaaatactttacctagacgtttaagcattgcagagctccgttactccagcaacaattttattagctgtgttccagtcattacgaccaaattccgcaatcggaatatcaatattaaagtggctttccaactcaacaattagttcaacagtacccatgctgtctagaactcctgcgtcaaataagtcttcatccatcatagaagaaacatcctccataaataggtcatcaataattgctaatacttctgatttaatatccattataatactccttattatttgttatgcggttgtgggaaccacaaaagatctaaaaatcctgaaaaaatcaagaaagaaaacataactacattaaaggtgatgaagacacccaaagcataagtccatttgttttctggtaaaagtggttttttagccaatcttctttctttattaatatttttcttcttacgtacccaagcgtcattaataactaggccaatcccatgaaagagaccataggctatatagtaccaagttaacccatgccagaatcccataagaagcatattgataatataagctacacttgaagtaacattacggtttttaaaaactttatttttaactaaaagcttaacaagcctcatgaaaacaaagtctctaaaccagaaagaaaggctcatatgccatctattccaaaattcttttaggtcgcgtgatttgaaaggtttgtcaaagttaatcggagacttaatccccattaggttagaaatagccaacgcaaacattgtgtaacctgcaaaatcaaagaacaaatcaaaaccaaaggcatacataaccccaagtgttggccaattaaacacaccaccctgttctagcgctaattcttttagaggaggcataatcagacttccaaaaatataggctaaaataaacttatagagaaaacctaacatcaaataatgaatcgcttgacctaacatatctaggagttcgtttcgatctgggatattaatgtaatcctcattgaatcgtttaaaacgatcaattggtccacttgagaaagttggaaagaagagtaaaaatcttaagaattcccataaagtaaattctttcaagacaccgtctctcatttcaataatcatagcaacagctctaaaagtaaggtaagaaattcctagaaacccaaaaagtgactgatgcccatcctcagatatagctggaattaattttaccaaaaatagcggaaaaatagataaacaaaccgttacataaaagaccaaagtatgattaaatcgtttccggtaagctttatagataaaaactagcagagactgtccgacaacgtatgccaatagtgacttcaattgattaaaagtactaccagtcaacatcattacaataaaacttagactaaaaataatctcatataaggcaaaacgcttcttaaagaataagccgatgtaaattggtaggacagctaagataaggtagaagaaatattgtggattcccataaacatccaagtgaggaagtttttctaaaaatgcctgtatcacttgtttacctcgctcataagacctttgatatcaattttcccatttggtgtcaaaggtaaatcctctcgatagataaatttagatggcatcatgtaatccatcataatgtcctttaagtcttccttaattgcttttgtcaaatccaaatcacgttcaaaatcatctcttacaccttcttttaagacaatataggctaataagttttgaactttatgatccttgttataacgtggcactgctactgctgattttacatactgcgatttgtttaagttttgagaaacatcttctaattcaatacgatagccgttaaatttaatttggaaatccatacgcccaccgtaaagcagaagaccttcatcggtcatacttcctaagtcaccggtatggtaagcaggtagaccttcgaattggaaaaatgcctcagctgtcttttctggattgttaagatagccttttgatactgctggtccagcaataatgatttcaccttgctctccgtttggtaatttatgaccttcttcatcaatcacatacgttggtgagtcatctttagtgtaaccaattggaaggcgtttgcatgtttctaacatttcatcagtaattgctactgcggatagagcaactgttgcttctgttggcccatatgcattaacgatacgagcttttggaaaacgttgacgaagtttttgtgcagtcttgacagttaactcttccccatcaaaataaaaatgtgttaactgtggcaaggtctctgaattgaaatcgttagatagtagcgccatatcagcaaatgatggtgtcgaagtccaaacctgtattggcaattcattaatggtagcgaatagttttttgaaatcattaactactgtctttggtagggcaaacagggtgcctcccatagctagtgttggtgcccaatacataactgataagtcaaatgaatatggcggttgagccaacatttgcggtctttcaggaactgaaaactcatcatcagaaatcatccaatttgtaaagctcaataaattgtcatgtgaaatttgcacaccttttggtaaaccagtagtccctgaagtgaaaataatatagtaattatcatcacctttaacagaatgtgttacctcataaggagtcttttcttcaaaaatagctgaaacttgagaaacgtctaggattgggacattatcaacttcaagaggaaattcaccaattgaaatgataaggcttggttgagcaactgtcataatagcctgtattctatccaaagcagagtgttggtcaaccggtatataagcatgccctgactttgttaaagcaacaaatgtcgccaacatttcatattcttgaccaccgaatactaagacaggtgatttttcaacaaggcctaggctatcaatatgagcagctagagagtcagagtctactttaagttgtccataagtatggacttcccctaaaatatcatacactggaaaatcagcttgtgtctcagcaaaatgctcaattgttttaatcatatcatgtatcatttgtaccatctcctagaattcattataaataaaactgccttgtccgcgactaaggtatgcaaaaaagtaaattagtaacaataaaataccgaagtataataacgttctaccaataaaagataaatatggtttcatcattcttcctttaattaatcatggtattggtccaaaatccatcaattggtaactggacttcaagacgtaattggtctttttcttgatatgctctaattctccccttatggcgttccacgattgctttagcaatagataagcctagaccaaaactgagagaatctgcatgatcatctttagcttgataaaaacgctcaaagagattatccataacctctttggaatagatagcacttggatttgatattgtcagaatagcttttcttcgagcttgtttaagactaaactggattgctgattttgacaaagaatgcctaatagcattatccaaaagaattattaaaatttgcttaatctgactctcttctccaacaatccagacatcatcttcaatcgtatcatttaaacacttttcttcttcatatgccaaactttcatatgttagaagtacttcttgacataagacagataagtttaactttttgaaatttaccttggagcgtttttcatcaagtctagacaaattaagcaaatcttcaattaaaaactccattcgcttagtctccgaaacaacatgatccagataacgattccctggaatttgctgttccagaacctgaacgttggctcgtatagctgcaataggggtcttcagctcatgactcgcatctgaaacgaactgtttttcgcgagtcatttctgtctctacaggtcctacaataaatcgagaaagataaagacttacagctgctaataaacaaaatccaaaaatagtaaaaacaagaattagaaaacgccttgcataagggacttcataactagccaaatccataatagctatggtgtaggttttatctttatattcttttatggaatatataaaagacttccattttcgtgacttctttccttgctcaaggagcttcaaactagatttttcgataacatcatttgtcaaatcagtattattgctttgaatcttaaccatcttttggttatctatagtcaccaaagcaatcggttcatcgcctggtattcctaaataatcatttttggcaactaatttaacaatcctatatgcatcatattcatcccaatattgattgtagcgattactaactgcaaatagaaagagaacaacgacaataaggattgacatggtcaaaaagacaaattttttgcgtaaatcactaaacattatgtcctctcctccaaggaatatccaaagcccttagtggttattatttcaatgtctgcttttaaaaagcgcaatttttttcgcaaaaaagaaataaatacttctaactggttatattctgaattgtctgaaggtccccaaaccttagaaatcaactgatttttaggaataatctgctttgcatttcgcataaaaacttccatcaagagaaattctttattggataattttacactactttctttagattctagctcatgtgaatctgtgttaagccttatatttccaagccgcaattgatttgctctgattagagaagattgtctggttctcagcctaattctagctagcaattcatctgcttcaaagggttttgtgatataatcatctgcccctaaatctaaaccattaactttatcataagtctgtgattttgcagttaaaaagattattggggtttctaaaccagcttccctcactctttttaaaacagataatcctgagcgtttgggtaacataatatccaacaggactaaatcatagagacctgtcaaaatgtattctaacccatcatctccatcaaatgctaaatcaacagaataacctttatctgccaataaagcctgaatagcctctgctatacttttttcatcctcaactacaagaagtctcattttctagtcaccttaccatatatattatagtataaactagcaaaattgaaataaccttgaaaaaacgatattaataaaagtatttcctaagtcactaaactacttcaataatacaagcgtctaaaaaataaaatatcactcgctataaagatatttctcaataagaaatctcctcatattttaacaaaaataggggctatttgtctacgaatttccgcattataaactcacttttcattaactttatctataatatactcaaactactctcacaaaaacctttatcgttatgaaggtaccaaaaaagccaccagactcgagtacctgttggcttgatattattttgctatctatattaagctgataacactttacgtcctttacgacggcggctagcaagcacgcgacgtccgtttttagttgacatacggtgacggaatccgtgtttacgttggcgacggattttacttggttgataagtacgtttcacgttgaatacctcctgatagattttcgtattcgtttagccggctattttgatcagttactaaacataccatactattttataacaattttaggcctcttgtcaagaaatactttcaagttcatttgtcttttttcagtaaatagttccatttgttagcaagaaatgcttctctattttctccaactaaaagaaaagatgtgccatcaaaacaataataggtaatgaaataattgttctctctataaaaatgataaataattctagaatgttgatagggatcttggaacctaatatcaccgcaccagtctcagacatataaattaattgcacaatagaaactgttgcgacaataaatcttgtcatctcactgtgaatttcagccgccattatcgaaggaacaaccatatctgaaaaaccaacaatcatggtttgactcgcaatatctgcttctggaatccctaaaagttcaaggaacggaaggaatggtgtacctaaaattttaaaaataggtgttgatactgaaataatcaaagctattgttccgacagtcataattgttggcataacgccaaaccataaactaagtactgtcttagaggcattattgacaaaagtcttcatgtttccatttgcttttgatttatcgatggcaagcttaagtccccactctatcttgttataaccatccggaattacctcagatgtttctttctttggtttagtgtaataactatttgattgacgagataagggagggatataagggataatgaatgcacagacaacactgctaatgatgactgttagataaaaatggccaaaataatcagttaagccaacattctgcaaaacaacaagacaaaaagtgattgatactgctgaaaaagtagtggaaatcgttgcagcttctctactggtataataaccctcaacatactgcttatcggtcaaagcaattccaatagtaccatcacctacaaatgaggctacacaattaactgctgaccgaccaggtagctgaaagaatggacgcataatgggagttaggaagacaccaacaaactccagtagaccaaattctgtcaaaaatggaagaataaaacccgcagcaaggaaaatggtaaacaaaccaccaatcaaatcaaaaaggataaggccgcctgtctctttcccccataccatttcaggaccaatatgtaaaaccgtcatcagaccaagtgccaaaccgatcaaacgaataatcagccagaaaatggtaatgtcagaaatttcttttagcaagtcatttttttcaataaagctaggtctaaacagacgataacaaagtgctaacacacatgaaataaaaatgattagtaaaataatataatgtataggaaaaacagcgttaatccattgattaattgtcttagagattacagagacagctactgttgtcataccattatatttaaatggagtcattaataataatactccaaataacgacggaataataaaccacaagatatctttaatagatatactttcttttttcatacaatcctcctggataatatggaattgtttctaaatatactcataacttccattgtaaaattttataataaaaaaaacaaccttgaattaaagaaaattttacttagtaatactttagtaatttctcaaagtaagttccgtctgccctccaaaaccggaagttagtgtgaaaaggatttttatggtggaattaagtctgagacgtttgggttagaaatgagtttatccatcatgacaaaacacaaacacctaactctcttagaccgtaatgacatccaatctggtttggatagaggagaaacctttaaagccatcgggcttaatctactgaaacaccctactactatcgcaaaagaagtcaaacgaaataagcaactaagagaatcaaccaaagactgcctagactgtccgctactaagaaaagctccctatgtttgtaatgggtgtccaaagaggaggatcaactgtggttacaagaagaccttctatcttgctaagcaagctcaaagaaactatgaaaaacttttagttgaatctagagaaggaatccctttgaacaaagagaccttctggaaaatagatagagtgctttctaatggggtcaagaagggccaacgtatctatcatatcctcaaaaccaacgatctagaagtgagttcttcaaccgtttatcgacacatcaagaaaggctacctatccatcacaccaatcgacctacccagagctgtgaagttcaaaaaaaggcgaaagagcacactccctcctattccaaaagcgattaaagaagggcgacggtacgaggattttatagaacacatgaaccaatcagagctgaactcctggcttgaaatggacacggttattggacggattggtggaaaggtccttctcaccttcaatgtcgccttctgtaacttcatctttgccaaactgatggattctaagacagctatcgaaactgctaaacacatacaggtcattaagaggacactctatgataacaagagagacttcttcgaactctttcctgttatcctaacggataatggtggggaattcgctagagtggatgatattgagatagatgtttgtggacagtctcaactcttcttttgtgaccctaatcggtctgaccagaaagcaagaatcgagaagaatcataccctcgtgagagacatactgcctaaggggacttccttcgacaacttgactcaagaggacattaatctggcactatctcatatcaacagcgttaagagacaggctctaaatggtaaaacggcttatgagctattctcttttacttacggaaaagacatcgcaagtatactcggtattgaggaaattactgcggaagacgtctgccaatctcccaaactattaaaagacaaaatctaacctaatcaactaactgatacaacctaaacgtctcacactaacttcaaccatagcggaacttaatctgaaacgctttcagatgaggatgttttcttgtaccctttttttgcgatttttaactctgaaaacctatgaaatcaagtattataaaaaccaacggaacttagtctgagacggattttcgttggtttttattggtttttatcagactaaattccatttctactagaggtggaacttactttgagaatttagcttagtaatactttataacctgccatttctttcattctctcacttttgatgtattaaaataatataaaacttatattaaatagctaaaacgacttaagtcacattaaaaaacacgctctaaaagagacgtgtttttttctatactatttagtccactctgaaacttcttttttgtggtttttaatccatttttgagctgctttagcaggctccatacctttatccatatctaacatgatagattccatatcttctttagtccacttgaacttatcgataattttatatacttttggcatatcttttttcaaattcttgcgtgctattgtattgatatgttcttcaccaccaaatgatttcttaggatctttaaggtattttaaatcatacttagcaaacatccagtgaggtgaccaacctgtaatgactacttgatctttgtttttgatagccttccctaaggttgttgtcatagctcctgttgatgctgataacaacttccaacttgaaaggtttggataatctttaagggattgtttagcagacttcataatacctgcacctggttcgatacctgtaatttgtttatctgcttgatttgataattcttcaatactatttacgttcatgtatttaggaacaactaaacctattttgacgttctcaacgtgaggacctaagtcatctaaactatttttgtatttattaaaatattgcccgtgggtctttggtaaccaagcacttgttgtaaaatcagcattcccattggcgactgtttgccacatgaccgcattgtcaagtggtgtcaattcaacatcatatcctttagattttaaaacttcagcaataacgttggttgaagcaacttctgaatcccattggacataagctatcttcactttttgacctttggcttcatttcctgaagtcatattgacaacaatgcgaccaagagctgctagaatgaagagagccagggcccctaaacctacccattttttaacttttgatgttttagcttgcttctcacccggtttggaattaaagaattgactaacacggtctaacacgattgctaaaataactagcgatagaccactaacaaatcctgtaccaatatcagcatgttgaagcgccgataacacctcacgaccaagtccaggtgcaccgatcatagatcctgtaaccaccatagaaagagccaacatcatagtttgattgattcctgccataatagtgttcttagcaagtggtagttcaactttgaataatttttgcttaactgttgaaccaaatgaatcagatgcttctattaattcaagtgggatttcacgaatagccaagttagtaaagcgcactgttggaggcagagcaaatacaacagaggcaaagacacctggtaccataccgataccaaagaaggctactgcaggaataaggtaaacgaatgccggcatagtttgcataaagtcaagaattggattaacaacttgtttaactttatcactttttgccatccaaatacctagtggtacaccaataataatagaaattaaacttgctactaaaaccaagttaaaagtattaatcaactgttcccacagcccttggttatagataaatagcaaaccaatgaaagtaaatgtcggtaattgccattttttcttagctaagaaaaatacagcaattgtaattagtacaataaaaagtaaaggattaatgaatagtaatgtttttgtcatccaatccatcaatgcattaccgattgtctggataaagtcaaataaaccagaaaaagttttcgtaatccaattggtcgttgactctacaaatggtgcgaccggtaacttatgttgtaataaattttccaaaatgatttgtcctctctattaagcttctaccgtttcttttggcgattctactactgtttcatcttgaacgttagcaagtgcttcgatcacacgtcctctaatgataacccctaggagtctatcattatcatcagtaacggctatcggagcagatgaatcataaattaaaggcatgatatctgtaataactgtatcttttgagaccgttacaacatctttatcaatcacttcagaaagcggcaaatctttcttacgagcttcaattgcagcatctgcagttagggatcccagaagttggcgacgacgattcgttgccattaacattgagacttcctcacgatgcattcttgttaaagcaacttgtgggccatcaatttctaaaacagttgttaaaggttttatcataatattttgagcagttaacacttttgagcgatcaacgtcttcaacaaactcacgaacaaaatcattagccggattagtcaaaatctcttctcctgtaccaatctgcatgatttctccatctttcatcagagcaatacgatcaccaatacgtaacgcttcattcaaatcatggctgataaaaataatagtttgtttattcgtgtcttgaagatcaagaagctcatcttgcatttcacgacgaattaatgggtctaaagctgagaaggcctcatccatcagaaggattttagggctgttagcaagggcacgtgctaaaccaacacgctgttgcattcctcctgataattgactggggtactgatctttaaacggtaatagacctgcattgtccaaagctttttcagctaacgttgtacgttcttccttagaaacaccacgcatctctaacccaaactctgtattttctaaaattgtacgatgtgggaaaagaccaaaattttggaaaaccatgttgatatcatgacgacgaatgttacgtaaatcttctacattcatctttgcaatatctttaccatctaaatagatatttcctgatgatgggtcaatcaaacggtttaacatccgaactaaagttgattttcctgaaccagaaagtcccatgataacgaaaatttcgccttcttttatttcaaaactcgcatcatagacacctacagtcgctcctgttttttcaagaatttctgtcttactttttccttgcttaaccatttcaagagcagctttttgctttttcccaaaaattttggttaaattcttcacttctaaaatatttgtcattcttatctcctactaaaaatttcgtatcttatttttaaggttatgtgtcttatctataaagtgacgttaagttatcgtaaaagggtagtcacttttttactcaaaaaaataaactgccgaaacagaacataactataatatcatgtatggtctctttatgtcaacacctttgcttagagatattttaattagcccacaccattattgttatggcattattgaattatttaaagacttattagtattaatattacaactttaaaagtgaccacttaatacttttgaaaaagcggtcattcttctataaaataacaaaacacccttagaaaaaatctaaaagtgtttttgtttgtaagtataggcctgaaaaaagtgactacttgatattttcccatttccaattttgtacttctggaatatcgtctccgtgttcacgaatatagtctttgtgataagcaaccatttgattcatttcatcactgaaggcttgtgctttatttcctaaagaagcaagagctgcatcctgtgccagatggaatcggtccaattctgacatcacgcgcatatcaaatggtgttgtgatgtcaccattttcacggtaaccatgcgtatgcaaattatgattgtgacgactaaagaaaatatctcgaatcatatcttcataaccatggaaagcaaaaataacaggtttatctgtggtaaagactttgttaaactcttcatctgataaaccgcgagcatcttgtgaaggatgacgaagttttaggatgtctaatacattaacaaatctaatcttaagttctgggaaagccttatgaagaatgctaatagctgccaaagcttctaagttaggttctgttcccgccgcagcaaagacaacatctggctcttgattaagcgacacatttgaagcccagtcaatcaccttatatccttctgccactaactcttctgcttcagcaatagagtaaaattgtggacgagggtgcttagatgtcacaattaaattaattttatcttcagctttaaacgctttatccataacagctagaagtgagttagtatctgctggtaaatattcacgaatgtattcaggtgttttttcagctaaatgagttaaaatacctggatcttggtgagtataaccattatgatcttgttggaaaacagttgaagctgcaattaggttaagcgctggataatttttacgccatgttgtgtgtgtttttgatttacgtaaccatttgaaatgttgtgttaccattgaatctacaacgcgaaggaatgattcgtatgaagcaaagaagccgtgacgaccagttaaaacataaccttctaagaaaccttctgcttggtgttcagacaattgggaatcaataacacgtccagctggacttaaagcttcgtcataatctggtttacgacgaccaagccattgacggctagtacgtgtaaacacttcttgaagacgatttgatttcgtttcatctggaccaaaaatacggaaattatctggattagcatctaccaaatctgctgcatattttccaaattcaatcatatcttgtgccataatttgacctggaacattaatatcaagagcaaatttcttccaatctgctgtatccattgctttaacaataccagcattggttattggattcatggacatgcgacgatcaccttttggtgaaatagcagcaatctcatcaacgattttaccattttcatcaaataattcttctggacggtatgattgaagccatgacaaaagagaatcaacatgttccatatggtgggcatctactggaattggtacttggtgagcgcggaagccaccttcaattggtgttccttcccaagcttttggaccagtccaacccttaggaatacgtgcaactaagacagggaattttgcttggatagcttcttctgctggtttttgtcgtgcttctgattgaatggttttaatctcttgaatagcttgatctaatttttctgcaaacaaagcatgagcagccgcatgatcctcagagagttcaacaacatctgcaaaaataggtttccaacctaatccttcaaaaaactgagataattcttcatctgtcttacgttcaaagatagttgggttatggattttaccaccatttaaatagaagattggtagaacagcaccatcatttactggattgataaaggtattagatagccaaccagccataagtggtcctgtttcaccttcaccatcaccaataacagtcgcagcaataacatctggattgtctaggatggcacctgtcgcatgagaaagtgcgtaaccaagttcaccgccttcatgaattgaccctggtgtttctggtgcagcatgggatgcaattccacatgggaaagagaagattttacataactgcttaaagccatcctctgtttgctcaatatttgggtttaattcagtatatgaaccatctaaatatgaattagataccataacttgaccaccatgacctggaccttcaatatagaacatgtctaaatcgtatttattaatagcgcgatttaagtgagcatagataaaattttgtccaggtacagtgccccagtgaccaattggatgaacctttaagtcgttttcaaccagctctcgtctcaagagagggttatcctttagatacatttgtgctgcagaaatataattagctgctctccaccatgcatcaagtttttctaaatatgattttgtatcaaattctgacattatttctcctaatcttaattgtgattttagtaacatattttaaaattgaaaaactgcatatcatgcgacatacagtctctcattagccattatagaagtgctttaaattgaatatttgattcttgttcgaagcaatcatcaaaaccacgtgggtgatggtattcaattctatctttatcttgtggataagtgtatttacctccaacttcccaaataaatggatggaagtcatattgaaggcgttctttacgcattttccacaattgtaagatttcgtctgtagaagccatgaagttagaccagatatcgtagtgtacaggaataatgactttggcacggagattttctgccatacgaagaagatcgattgaagtcattttatcctgaataccaactgggttatcaccatagttgttaatagctacgtcaatcttgtagtctttaccatgtttagcaaaataatttgaaaaatgtgagtcagctccatgatagattgttccacctggtgtttcaaaaatatagttaactgctttacgagccatttcttcatcagtcacggctaaaccagcaagttctccatcatgttcttctgcaccatctactggaagtgtcaccaagcaagtacggtcaaatgattcaacagcagtaactttgatatctttaaactcaaatgattcacctggtttaatcacgatgattcgttcttctggaactccccattttttccaaatttcaccacattcatatggcccaacaaatttaacatggtctaagttaggattattaataatggctgccgcagtgttgatatcaatgtggtcactgtggaaatgtgaaacaagatagtaatccaattcattaatagcaaatggatcaataaccattggttgtgcgcgtaagtttggttggagtttacgaacacctgccatattagccatttggtgtccacgaaccatatcttttactttttttgttgatttaccgcggtttgaccataggtccataacaacattagcaccacctggtgttttaatccaaacaccacagtttcctaaccaccacattgcaaagttgccctcagcaacaacttcttcttcaatttcttcgtttagccatgtaccccattctgggaatgttgataaaatccatgattctctagtaatatctttaacgttaggcattttatttcctcctgattaattgtttcttacatctactagtataagttcaaatacttttgaaaaaaagaccaagtgtcacacatttatgtgttcaaaactgggctgtctgttccaaattagactcataattttaattaaaataagcacaaataaaaagtactcccattaaaagtactagctttctcaactttaattatcatgtcatagaggaactcattgcgattaaatatctagcacattgtttaaaagcaccaaaaaagccccagcttctttttctgtcttcagaaaagctgagaggctaccataaaattatattttaacaaactgtactttgaaggggaaggacgtcttggagcaattcttgatgaataagtttctcaatcttagatttcagcacgtagcgttcactatcttccttgacatattgagcaattgttttttcaagttcattggtaaattgattactatttgcacagttaccttttttagaaaagcgaatcaagcgaataatatcatcatctgtcaaaacagggtgaactactaacatcggaaaacgagattctaaagcatcactagtagagacaaccatatctacatgcataagatcactcacactttgatactgttcggttgtaaaaacagcttctatatcactatttgttaagtagcgttgacattgctttaaaagaagtttctgaatcgctattccttcatcagatacaataactaacttaagtttattaggagattgttgactattacgaagttcccctcctaaatgaatcgttagatatgctacatcatcatcggtcaatttgatttgccaagctttctctaaaagctttacagaagacgaggttatggcaaaaagttcttcatatttgtctttaatatgctctgttaaaggattaacagaaaaaataccataacgtttacgatataagagtgccttgcagtgagtaagaagttgtcttagtaagtcctttttatgaacaaagtgaaggtgatatcgttcttccaattctttcaaaaaactggttagagtagctcgcatatcatcataatcctggctctctaaatgattgtcacggtccttgcggaaactaagcataagcatggctactagtcccacttcaatctcatccagtgataactgaaaattttcttccagctcatcagccaactctttagcaatctcatattccttacgttgccaaaccaagctaaaatcactattaagagaggtctgtacttcaggacttaatcgcatcttacgataagccattagtataaaaggcaaaatctgaatcataaactgaccatcttgactgttgattttcttacctagacttcgttgagaaatgaagagataatgatgaaaataatcaagaacctctttagaaaaataagtgctggcaccaaaagcttgagacagtttatgattaaaaaggtctataaaactactacttccattatggtagatatcatctaagagcttatataagtactggataatggacaatgggtgaccatctaaaaaataaccacgacattttgttgattgtaactgtaaattatattctttctctgctaactcacttcttaattcgtttaaatcgtttaagatagtatttcgagaaacatcgtttagttgcatcaacctatcaatcgttacgcggtccttagctactacgatagatactaaagacagctgcaacctctcactacttttcatgacgtaactataatcagtcacttcatctaataaaagacgacaggctgctttttgtttttctgttagcaagattcctacacgtggataactaacaatctgaggcacatcgctaggcagtgcatcgtttatcttctctaagtgataatacactttacgtctagactgattaagtgcgttggcaattgccataactgtttcaggttcctctaatttcaataggtaaaagaggaggtcataactttttttatcgagaataatcaagaatatacctcttttctactcgaattcatacagacttattataacatctttttaaagccttttcattaaaagttttgactattactgatagagattaaacgttgaacatccctttttaatatctccaactctgtggggtattctagagctagatactcacaattagagaaactctttaacaaatcagtcagattaatctctccttcgaagaggctcttcgagaggtggggctttccagctacctgtataaaatttttacagtgaaggtaggtggtatcacaagctaagttatttaccgcttggtataggtcttggttgataaaggcccaattagcagtatcaaaaacaaaacttattggtatttgtaattctttcactagagtcataaaatattggcaattctccactgtagctgctttagggtcttgattattttccacctttataccaatagtttggcttttcaatatctctttaagaggttctaactcttctttacttaagtttctggtttgtccaacatttagcttaatgaaaggagctcctaactgtgatgcttctttaaggcctttattaagataaggattaactttccctcctttgataaggtcttcattagcactatagtaaagattgatatcataaaagtcagcctctgcttttaaagcgggtagctctctatctggatcttgaagcaattcttgacgtatctcaaatcgtgaaaatcctaaatcctttactaacttaatgagctgaacttgtgtaaaacctttgtctaactgttttttgaatacaatactattgataataatatcttcttgtttcataacaactcctttgatatccctacttattcagatgaccgagttccgaccaaataggatccagtgtttctaataatttttggtaagcgtgatatttttttttgtacccctttacttcggataattgaggtttataaatagcttttacacgaaccatatcttggactgcttcctttaacgaaatcttatctaaagcatgacgtgctaaaatagctcctcctaaccctcctaattctgtgccttctactgtttcaataggaaagtttaagatatcagaaaacatttgcatccatgctggtgagttggtagctccgccagagaaacgaattatttttggcacactgcccctactttttattaaatcagtgatatgctgcttatgtgcaaacgcaataccttcatataccgcacgtatcatctgagatttcgtcgatttagttgttagcccaaaaaagcaagcgctagcatcttgtgatgtgttactaccgtaaagaaacggaaagaaaataagtccatgatgtgtagcatcagtatgagtgagaaattcttctaaattatcatagatagaacctccactagatttagcgttatcaatttcttgatgcatgagcatttttaacataaaattaagattccctgcagaagtagggctacttgcctctaagagataacgacgatctggaaaataggaagtcataagaccactatcttgctttgctggttttaaacttggatatgtattaatattccaagttcccgaaataacactaaaagtatctgactctaaaacacctgatccaagagcacaagcatcgatgtcaaagagccctccaacaacgggggtcccttctacaagaccagtctcttttgctgcttgagaactaattcccccaggaactaaatctgcactatctataagttcaggaagtgagttttctatctctctaatgccaaaaaaatctaaaatagctggatcataagttcctgtttggaaatttatccaatgattacctgaagcgtcaccatattcttgctgtacttttcctgtaagcttataccgaataaagtcctttgcagaaaggaccgcccctattgatttataggtttcgggctgataatctttaagccaacgtaaaataactggactttgtgaagggaaaatatgttgccgagtcaactcccaaatattatcaagtttagattcgaaatattgcgccaaatctttggcacgattatctgtagacaaaattccttgttcaagtggctccaacttattatctagcagataaagacctttcccatgtccaatacatgctactgcactaatctgctcagggctgagttttgagatttgaataacctctctaatagcagaagttatagcattccacgttttaacaaggtttacttgacgatgaccagattgagtctcattttttaaagtttcaaaactcgaaacagcgatttggtgtcctaatttgtcaaaaataagcgccttggtatttgtaccgccgtagtcaatactaaggtaataagtcataatttgtctcctcattgttgatttaaaaaggaggtacaagaaactcttgtaccttgaaaactcttctaatagagattgagctctttggttgtatcatctatacctgctctgttagcctttacatgttcttctttaaagtaaacacgctcagcattattgtacataacatcttctagttcctcttgactgaaaatatcaacattctctagccaagtagctaattcttcgtaagtattgaaggtcgctgaccatggagaatcagttccccaaatgatacgcttagccccaagaacttctttagcaatacgtacattttgttctgattttggaaaaggaaaactatctggggcatcaatatcttgaatagctgaaatatcagtatagatattgttgaagtttttccacatattaagttcagcacgcaatcgatttgaatgctcaacatgtggaaaagagaggtgacaaacaacaaaatcgagactcgtataaaggcgagctaaattagcaatagcatcaggttggtgactaatttgatcccaattgccataatcaactgtaactacaaatcctggatagtctaacagataagtcaaaatacgactcacatgtgggtctgtatcaagacggaaaggcgttttttgtccacggtatccatggataccccctccttgactaatttcaaatttaatagctcgaaaaccaaggacttcaacatgacgttttacaatttgcattgcgttatctgcaaatggatcaacagagaatgcgcctgtaaaacgttctggataacgtttaatagctaaatgcgtataataattttgataaccattaagatgaccttgcaaaatgactgctttatctacaccattagcatccatatacttcaaaaaagcttcagctgtaaatgctttgtcaccgtattcgtctgggatgagcttaattaaatcaccatcatcccaaatagcataaccgtttccaagggcattaagacgtcctttaccattaaatcctgcaattgtatcaacaatatgagcatgtccatcaatttttttcatgagtattcctccaacagatttttaatcttcagcaataaagattttttcacaactaccttcatatccgctattcttatcagccatagttttaaggtatgcgtaaatagattcacgatgagtacgaagcaagaacaagaaagcaagatagataacaactgtcacaccaatatagagtgggttcccagatatccaagcaaagaagactagagctgtcaaaggatgagctaggagattaaagctcataatcaaagttacccctgctggtaaagcagttccaaaatgcttaacagcttctgtgtagattggacctagggcactagcagcataaagacctagtgaaaaccatatgattccattcaaaatagctttaagaatatttccttttgacacagctatcatagcttcaatcataaaagggatagcaataaggtcaacgactggtaaagcttcatttccaggtaaaatcaaggaaataacaaccattattggtactaaaatgagacctgcgataatagttgctggttcaccaaaaccaacaccgtcatcaactgcaataaaccaacgttttttatccagtgctccttgctcagcttgactttcttttttcttattgcgttcaactgcttcagcaagaggagcaaaagcactagcaaatacccccgtaatcaaaggaaaaatagtcataaccgctgcaagagcaactgcaaaaccaagtatacctccccaagtatcaatacttgcaaggttacgtaaactacctaatacaccaataatcacaccaagtataaaaccaagtgtcattggctcaccaaatatccctaacttagtctttaatgattctgggttcaactttaccttattgacaccaagtaggttccaaagaggatcaagaataagagctggaataagggtttcaatattatgaatcgagttgatcgttgcatttttaacaccgtaatactccgaccatcgatctgccaatacttctgacatcactaatgaatagagtaagacaaaaaccataaatgcgaaagacaatataaaattacctgttgctgcataggccattgtaccccaaatcatatagccaaagttattccaaagattagatgggacaaatactcgggtaatcccaagcaagaaaagccccaattcaattagcaagccaaaaacaaagaaagagaggccaatctcagaagaaaaggcggtgagagaaccagcctgccaaccaatatctacaattggtaaatggagaccagtagttttaaccatctgctggatatacttagtcaccataggagcaaaagctgatataatccaaccaaagcctgtgagtccaacaccagctcgtaaggcgctaaagaaagctcgccttggattgacctttagaaaaaggctgacaataaaaatcatagcgggtacaacagttgctgcaccaaagacttcaaagaatttatgtaaagcttctagcataagttcacctttattaaattattaagcgcttacatttactcgtaaaaaaatgggaggtcccattttttcaaaagatggctctgcgctcactagccaattatttattgacaatattttgtggcttgccatcaaagaaggcaatgatgttgtcagctgcttcttcagccaaagttctacgtccctcaatagtacctgtcccagcatgtggactcatgataacattatcaaggcttctcaatccttcagatacctgtggttcattctcaaaaacatctaatcccgcacccgcgatttcaccttctttcagtgcttcaataagtgcttcttcagaaacgattgggcctctagcagcgttgattaagtagcttcgatttttcatcttagcaaaaacatctttattgaatttgtggattgttgatggtaatgctggggcgtggatggttatgacatcagctgttttaataagctgatcaaattcgagataggttacaccaagctctttttccttatcttcaggaagtcgataaacatcattgtaaacaacagtcatcccaaatgctttagcaaaatttgcgactgtcaaaccgatgcgtcccattccgtaaatacctaatgttgaaccttgcaaagtcaaaccttgataacgttgttcgctcggatcaatccactctccacttcttacaatactatcataaaatgcaaggcgcttactggcagctaaaattaaagcaaaagtcatttccgctgtcggaactcgtactgcttgaggggaattagagactataattcctttttctttagcatacgcagtatctacatgatcaaaaccaaccgcatttaaagaaataatttgtaagttttcacctgcatcaatcatctctttatcgcctttttgtcccatgagtaaccatccgtcatattcagataaatgctctaacacatagtcacgtgaaaatgggcgatcttctgaataagtaacatcaaatcggtccataagctttcttagaccttctttaggcacaatacccgttactaagatttttttcttgtccatattgtctccttcttaaatttattttactaattgataaagagcaacttcgccacgtccgttattggctgagaaaagataagcttttccatctttttcaaaagctaagacattactagaagctgcttttgcatctactaattctgaaaccaagtgcccatctacaaagtgaaaaagccttaattctgctttttctgatcgccacccgaatacaaaacaagtctgattaagtaaacgaccactccaaatagcatgaccaaatggtgttttttctggataatggaataattctcgaccgaaatcttcagtgaagatgcgtaaacgatctccatgaaaaccttggataatcacatactcatccttgccatcctgattaatatccactttcaccacatcgcttgtctcctcatcgaaaagccgttctaattgccagtcgcctgtagtagaaaattctggataagtgagtttgaataccccttctactgaagtaatcaatgaatatccttcatcctgaatggcatagtatccatgattttttaataaagtttgaggcaattgttgcaatccttccaatgtatggttttgagtattaaaacgagcaacaaaaattcggcctttatcactccaatcctcagtgtgggctttactgttagcaattgtacaacctataaagtaaagttgattttctttacctttaatgagatcaaagcgatgtaaatacggaaaatcaaatgcgttacaaatgtcccaatgatctccttgaaaacttgcataaacaacctgacaatctttggccttaaaccctgggtaaaatttctgggttgccaaaaaatccatggttccgggaattggaataatactcatggtacctcccacatcttcccaaacaacaatttttgctaaatcgctattcaaatcataagcaaagcaggcttggtcaacctctgaagctactaataaaaaatcatagtcttgattttgcaaacgacaaactgaataacaagcttcaagtctgtctgacaataatttattaatcttcattctatcctcctttggtgaagataaaacttgagttaaccgtttaactaatggtgcaaaaaaataaaaacatttgagttaagagagttagagatggttcgttaaaagcttacctattcttaagttaaacggttaactcatttataattctattatactatcattttctataaaagcaagcgtttacatagtgttttttgcttttttataaaaaaatgcttgctctcgcaaacatttttaaaaagattgacgaataacgatttgattttttacttctagtaaccttgcagtagttggttcgtttccttgactaattttttcaattaaacattgggcagccaggcaaccaatgccatatgaatcctgttttatacaggaaacgtttggtgtaagcacctgcatccattctaaatcttcataactcccaagaccataatcctcagggtagctgaccgttgattgatttaattttttcataaaattcaaaagagttggaccgttcatcattaagaaccctggtttttgctctgaatgttcaatgatatcaagaattctctgtgtactaccatcttcagtgataataatcaacttatcaggatttgaactgaccacttctttaaaaccttcgtaacgaagctcacgggttgaaatcccttcaatgggataagtgacaaaatagatgtcatgatacccagcttcttgcattttttcaagaaatatttgagtcgattctttattgtcggatgctacagtatctactttaatatctttagcttgtctatcaaccatgacaagacgatcattactcaaagtttctataaatgaatgattaggatctacagaatctaaaataattcctgaaacgttttgctgatttaaacggtttaaattttccaactcaatgtcaatatcattatccgagttagtaaagttaaccgagtaaccaaattgttgacaagtatcatgtattcccttcatcacagacgaaataaagggattagtaatatcagcaataacgaccccaatagtacgggtattttttgtaactaaactttgagcaatcttacttggttgataaccagtctccttaatagctaaacgtattttttctttcgtttgcagagacattttcttatagttcccattgagataataggaaactgtagcttttgacacacctactaaatttgcaatatcactaatggttaccttctcaaacatctctatttccttattctaattagacttaatttatccgtattatatcatttaataagaaaaatgaaaataagtgttcttattggagaagattataaaaaaagacaaacccattatcaaagtttgtcttgcactagtataattaagagtttgctttatcgtaacactacttcttcttgaaactatcccaatcttttaagaaagtttcaatccctttatcagtaagcgggtgagtaaatagtgatgcaaatgttttatctggaatagtggcaatgtgcgcaccgcatttagcgacgccctccacatgcgccaatccacgaatgctagcagcaataatctcagattggaaaccataaaaatcaataatgtgacgaaggtcacgaatcaaagcataagcatctgttccaatatcttcaagacgacccacaaaaggactaataaatgttgcaccagctttcattgccgaaagaccttgagccacagtaaatattaatgtcacatttgtctttataccttcttttgataattgtgaaactgctgctaaaccttcttcagtcattggaattttaacaacaacatttggtgaccacttagcgatttctctagcttcggtaaccatttcatcacaagttaaacctgtcacttctgcactaactgggccatcaacgatttggcaaatttcgttaataacttctttaaagtcacgcccctcacgtgaaataatagtcggattggtagtaacaccatcaacgattcctaaacgattaagacgacgaatttcagaaacatcggcagtatctaaaaagtatttcatattattctccttaatgttcttgtcctttttgaccataataagcatttggtccatgcttacgtaaatagtgtttatccataatatattttggagctggttcaacacgtggattaatttgttcagtgaaacgattcatcttagcaacttcttcaagaacgactgagtgataaactgcttgtgctggatctttcccccaagtaaatggtccatgattacgtacaacaataccaggaacagccattggatctaaatcccgacgttcaaattcctctataataacgctacctgtttctttttcataagcagtgttaacttcatcttcactaagtgacctagcacatggtactggcccataaaaataatctgcatgtgttgttccataaaatggaatatcgcgacccgcttgtgcccaaccaactgcttctgttgaatgagtatgaacaataccaccgacttctggccatgctttataaagttgaacatgagttggaagatcagatgatggattcaaatccccctccactatatttccctctaagtctgtgacaaccatattttcaggtgtcaattggtcatagtcaactcctgaaggtttgataacaatcaatcctgcttcgcggtcaacttcagaaacgttaccccaagtaaatttaactaaactatgaactggtagtgatttattagcttcacacacacgttcacgcatttcttgcaatgattttgccatattatttcactcctgttttctccattaatgggtaaagaaaatcttgcgcctctttaatggctgcacgtgtttcctctacagtctcacagttctccgaccacatttcaatcaagaatggaccattataatttgttttcttaatgacagcaaacatttcttcccaatcaacacacccttgaccaaatggaacatcacggaattgacctttagacgtttcggtaacagcataagtatctttaatatgaagcgctgcaattgagcgatgtccattataaaattcactccaaagatcattatgccatgctgatacatttccagtatctgggtagacaaagagataaggagaatcaatctctttttccacagccaaatatttctcaatggaattcataaatggatcatccataatctcaatagatagaataacttgtgcttcttcggcccaagtacaagcttgacgaagattcttaataaagcgtgcacgtgtctctggagatttttcttcatagtacacatcatatcctgctaattgaatattacgaataccaatatcttgagcaaagacgatacattttttcatcatatccatcgcacgcgcttctttctcaggattattagatcccattgggaaacgacgatgaccactaaatgtaattgttggaacacgaactcctgtctcaaaaatagctttgaccaactcaagtcgttcttcttttgaccactccaaacgtgccaaacgttcatctgactcatcaatggataattctacaaaatcaaatcccaattctttagcaaattgtaggcgttctaaccagttaaaatgttttggtgttgccttctcgtaaattcctattggacgtgtcatatattacccccaaatacgtttaatttcatccttaaatgcacgtgctgctgcggctggatcatctgcctctgtaataccacgacccgcaataaaagtaaagacatcaacaccttcaaataattgaagagtatcagttgataaaccaccagttacagaaactcggaagcccatatcaatcaattttttaaccttattaaggtctttctctccccatgtttcgccagcaagaagcgcatcacgagattggtgataaatggcttgtgaaatacctgcatccaaccattgttgcgcttgctcataagtccaatcaccatatagttcgatttgaatttctccacgatcgccgcgttcttctttgatagcttttaaggctgcttccattgttggaatagtagcacaacagatacaagtcatccagtctgcaccgcgaacagcattatttttagcaacagtcccaccagcatcagcacattttgtatcagcaacaattattttgtcagggaagagactgcgaaggacctcaactaattcactacctacttgaagaaggcaaacagttccagcttcaataacatcaacttcatgtcctactgatacggcagctttgatagctccttgtaaatctgagtggtcaagtgcaacttgtaaatttggtaaacgttttgtcatgttgtttattctaaggacctgataaaaatactcattttatttgtggcaaagagtttcttatcacagagattttttataggtcctatcctttctattaatatcagtttattgattagctttctaaatctaaaccttctaaatatgggctgttttttgattcctctaccattgcaaggacttcttttgcttcttggcattccgtcaagcgctgaattgaattttccaattcaaaaagggcaataatttgagggatagcaacagaagtatgaatagctgaacttgttgcagcaagtgctaacaatactgagacttctttgccatctggaaaaactactggctctgttaatgtaattaatgaaaatgcatcacgttttacgcctgcttctggacgagcatgaggcatcgccatacccggcataagaatgtagtacggaccaaattcctctgtagattcaataatggcatcgtaatattctgcatcaacagcaccactttcaatcaatggatcaattgataatttgattgcttctttccaatcgcttgcagataatttaagacgaattgagtcattttcgataaaggcttgttttaaattcatgatttctccttaaaagtctaaagatatgggagagaaacttttgtctcactccctttgtctattaacttacaaaatttcttgtagttttgtttttatttcattgtcatccataaggttatcaagacctactaaatgaccttttgtacgtccgtctaattcatggataaggtggtttgaagcaaccacgatatcgtagtttgcagctaaaccttttgcttctccgactgagcaagatgctgactcaaagttgctaacgcctaattgacgaagcgcattttcgactttcattttgataaccattgatgatcccatgccgtttccgcatgctgtaagaactttaaccatttttatttcctccgttataaatttctattattctgcaggcgcatcaccacgatagtatgcttctttatctttagatttcataaattgaagttgtggaatagctaagaagaagagacatacaatcacgtaaccagcgatacctaaatacttgaagatgtaaccaaatgctaaccatgggaattcaaagtcgatatttccatgataaccacctgcaagtcctaaaagacctacagcaacagcaccaagtgccacctgaataatacctgagataaatgatagagctactgctgctttccagccaccacgtttatctgcataaacagcgattgccgcattatcaaagaatactggaacgaatcctgtgataatcaagattggatttttgaagacaacaagtagagcgattgtaattaattgaccaatcaaaccaaaagcaaatcctgaaagaactgcatttgaagaaccaaaaccatatgaagctgcaacgtcaactgctgggaatgatcctggaagaagtttgtttgagataccttggaaggcatttgtcaattctgtaacgaacatgcgtacaccttgcatcaaaatgaaaaggtaaactgagaatgtcaatgatgtttgaaggatgtacatgaagaaagcttgcttagttggtacaaatgcaccaggtccgattaatttaacattagacataatgtctggaccaaggacagctaagattcctccaaagaaaactagcatcaatgttgctgatgcaacaactgtatcatggaaaatatttaagaatgttggtaattttaagttatcaaggttttcttcttttttaccgaagaatggcgcaactttatcaacaaaccaaattgcaaattgttgttggtgtccgatggcaaatccgccaccacctgtaaggcgttgagttgcttcaacggtcatattagaacttaccgcccaatatagaccacaaatgataccaacagcccatgcaccaaaaccattacgaagttgtggaatcaagagcagtacaaatactgaaattgttgcagcttgttgtaccatgatatgaccagtaataaaaagagtacggactttagttactttacgaagagcaaccaagagaatgttaatcccaaaaccaatcaagagtgctgttgttgcaacactgataaagcccattgtttctaacttagcatttgctgatgctaaaccaaagtaagggtcaataacagcagcttctaaattaaattttttagcaagagcaactaagattggacggaatgtattaaccaatcctcctgcacctacgttcaaaatcaaatatccaacggtcgctttgataaaaccagcaaagacatcatgaagtggtttcttcaataaaagatacccaatgagtaccaatagacctacgaagaaggctggattctgcaagatattttgcgagaaccaattaaggggagctaggaagttttccataactaaagacctctctttatttaagtaatgtttttttgtatctttattatattttttgtaagcgttttaaaaaagaccaagaagtacacacttaagtgtgcaaaattgtgctgaacctaatttacaaaaaaatcatgtatcttaggatacatgtttttttatattttttaatgtagactcctaatgatttctacacgcgtcacaagaccatcgtgcatactatcaacacgcaatgcaacgttattaatatagactactgaaccaatagcaacgtccttttcctcatcatttaaatgacgaacaagtaagtctcctaaagtttcattgggttgacaaggtagttgaaccctagctaaaatattagcttttttgactttgttattagcacgtaaaacaatgttgcttgacccatcaaaatgggtgaaaagatatttacgaacagcaaacaaaatagcaactgaagcaatccccataaggtaatctgaaacactaccatgttcaattacaagttgacgagctaaggcaaacaataacacttcaattaaagtatctggggaaggttttgaaaacattttgatcaactcaatcccgactgctattgtcatggcgcgagcaaggaaagtctggaacaacttatcaacattttgatcaacagacaacatgctaaacaaatcatgaaagagtgctaaactaaaaaaaataatagctgttgccagaataactgacaaagcaatctctaaataataagccacctctacaataacatcttggaaaaatttacgcatacaatctcctcttttataaactaataacattataacatttcgtcgttaaagttactaattcaatgaaacaatagtgaccaccccttcattaaccttttaatcagtactaacgaatgtttgattacacattatgatataataagcttattggtaaataagtgggaggaaatgaaatattaattaataaacggttaagaacaatctccttactacattatctgttagcgctactacttcttatagacattatctttacgattgattttataattcacacgtcaacaatttccaaaaatagtctatcatatataagttatggtcaaggatttggttggtctatgattcttattaatttgatagctctacctatttgtttcctagtagaattgtcagctggtctactattaaaattagaaatgcataagcaacatggctactatcctctggaacgcttattgatgactggtaatattctaacagttgtatcgctagtattattacatactttgattcacaatatcaattcacttctttttttatcaattacagtagttttattgatttctgggaagtccttaagtcttattagtatctatctattaaaaagaaaaagtaaacatcaaaaagtctgactgtacagtcagacttttaatattaaatatttgaccaaacagactcaagaatgtttgtttgttcacgaccaggccctactgagaaagtagaaatacgaacaccaaccaattcgccaacacggcgaacgtaattacgtgcattttctggaagatcatctaagctacggcaagctgtaatatcttcagaccagcccggtaattcttcatagattggtttacaacgttttagctgttcaaggcttgctggataatagtcaatacgtttcccatcaaggtcataagccacacaaattttcaccgtatcaagccctgaaagaacatcaattgaattcagagagagattagtaatacctgatactcgacggctgtgacgcataacaacagaatcaaaccatccaacgcgacgaggacgaccagtcgttgtaccatactctttaccaatctcacgaatacggtcaccaacctcatcaaaaagttctgttgggaatggtccatcaccgacacggctagtgtaagctttacatacacctactactttattaattttacttggtccaactcccgaaccaattgtgacaccacctgctactggattggaagatgttacaaatgggtatgttccttgatcaatgtcgagcataactccttgtgctccttcaaaaagaacacgtttaccggcatcaagagcatcatttaagataacggatgtatcagtcacatattgcttaatttgttgaccatattcataatattcttcgaaaatatcatcaaattcaagaggtgtactgtcatacattttttcaaataaacgatttttctcagctaaattaattttcaaacgctcagcaaaaacttctctatcaagaaggtcagcaatacggataccgacacgcgcagccttgtccatgtaagctggcccaattcctttgatggttgttccaattttattatcacctttagcatcttcttgtagttggtcaagcttgatgtggtatggcaagataacatgcgcacggtctgaaatacgaaggttatccgttgttacaccttctccgtgaagataagctaactctttaactaatgatttcggattaacgacaacaccattaccaatgacagaaattttttctttgaagaaaattcctgaaggaattaaatgaagtttaaattttttgttatcaataacgatagtatgcccagcgttatcaccaccttgataacgtgcaattacttctgcgtcagcagataaaaaatctgtaattttacctttaccttcgtcaccccattgggtacctactacaacaactgaagtcatatttatttaacactgagtgagcctttttgggactccccaatcctttctggaaaaacatggcaggaatttcacctgcgagtttgtctgacaccttattatagcaaaaaatgtttttttttgccaaattcctcaaatattatcggaaaaaaagaaaaaaataattattagaagtgtaaaaaaacggtaaaaaactaacattatagttgataaagaaatcttgaaatttactgataccagcattcttaacaataaaaaattcaacgatctttttattagagtcgttgaattttaaattatcaagaacagttatcacaagtcagatatcatatctatattaatgatatttactattagcttttcatgaagtaactagttatctctagcctgtagctcttcttttgtaactaatttataatctttaaaaacaatgcctccaaaatagcctgctagtaaagataggataatacaacctagagcggttattagtacttttatcattgggttataggcaaacatgacagcaaatcctgcaattggtgtcgctgttccaggagtatcattaactaatttcatcaaggcaattaaaataccacaagctgcaccaccaacaaaattagtgacatagattggaatagggttagctgaagtcacgtcagcttgagttagaggctcaacagcaaaagctatattatctttacgacttccaagttttaatttatggaaaagtacaccattcataaatgacgaaccaaagacagacaaggctcctatagccataggcattccggttaatcctagcatagctgtcaatgccatagaagaaagtggtgctgtcgccactactacaattgtcccgccaagtataatccccattaaaatagggttgctatgagcacctgatgttaagatatctccaatggtgagcaaagtgctattaataagcggcgtcaacagtttggccacaagacgtgttaatggtgcaccaataataataattgaaataagatctaaaccaccaggaatatttctttccatccacttaacaagaaatcccactaaatatcctgcaaggaaaccaggaataatacctgttccagaaacagataaaccaattaaaactgcgtatcctggggttacaccaatagcaatagcaaccaatatagctgcagctacaccagaaagtgaaccattagcaccacccacttcacttaaaaattgaaatcccaaaactttaccaaagaaagaatcttgaaaagcttctacaaggaaggatgcacaagccgcagatgccaatgctcccattgcttttgttccgtagggtgctttataattaaataaagtgaaaatcgctaatacaagtattaaaagactggtcccaataatgatattcataaatatactcccgctaaaaatagttaagttttttattctcagtgtctgtgtactactgcttcaatttcaataaaggcgcctttaggtaatactgaaacttaattgtactacgaactggataaggtgcaacaaagaagtccgacataattattaggcttatctcatggattactccttagttgctaatataatcacattttacctaaaagcataaccatagtcaataataattttttattttattaacttttttttattacgataattttttattacattaatcttttaaaatagtctgatattgtcttttaaccataaatatattactataatagtaagattagcatagaggaactacgatatggataaagaaaaattagactattggaaaacgataataacgtttctccataatgttttaggtgataattacgaaattgttttgcatgtagtagatgaaaatgatatctatattggtgagttggttaatagtcacattagtggacgaaccataagttcacctctaacgactttcgcccttgatttaatcaagaataaagtttataaggaaaaagattttgttactaactataaggcgattgtcagccctctcaataaagaagttcgtggatctactttcttcatcaagaatgctcaaaatgaacttgaagggatgttatgtatcaaccttgatatttctgcataccaaaatattgctttggatattctagacttagttaatttaaatgttaacaaaatactacctaagtcccctcaaaaaatttctctccctcaacaggaggaacctgtagaagttctatcaggcaatattcaggatattattagtgagattgttgatcctagtcttttaaatcagaatattcatttaagtcaagaagttaaggtagaaattgtttctaaacttcacgaaaaaggtgtattccaattaaaaggtgccgtttcaaaggtcgctgaagttctcaacatctccgaaccaagcgtctatcgttatcttaaaaaaattgaaactcattaactctaaaactctttttaacttatagattaataagattggactcaaaagttcaatcttttattttttatgacaccggtataagattattttagttttctgtgccgtaaaacttagtttttattatttttttgataaactagtatcatctgttactaggaggaatgttgtcgtgattatcgatcgactgttacaaagaagccactctcatctaccgattctacaagctacatttggcttagagagagaaagccttcgtattcaccaacccactcaaagggttgctcaaacaccccatcccaaaacattagggagtcgtaactatcatccttatatccaaacggattatagtgaacctcaattagaactcattacacctattgcaaaggatagccaagaagccattcgatttttgaaagctataagtgatgttgctggacgctctatcaaccacgatgaatacttatggccgctttctatgccacccaaagtgagggaagaagacatacagattgcccaattagaggatgcttttgaatatgattatcgcaaatatttggagaagacttatggaaaactaatacaatccatctctggaattcactataatctcggtttaggtcaagagttattaacttctctctttgaattgagtcaagcagataatgctattgattttcagaaccagctttacatgaaattgtctcaaaattttttacgttaccgttggttactaacttatctatacggagcgagcccagtagctgaagaagactttttagatcagaaactgaataaccctgtccggtcacttagaaatagtcacttaggttatgtgaatcataaagatattcgtatttcttatactagcttgaaggattatgtcaacgatctagaaaatgctgtaaaaagtgggcaattgattgctgagaaagaattttattcacctgttcgtctccgtggtagtaaggcctgtcgtaattatttagaaaaaggaattacatatttagagtttcgcacttttgatctcaacccatttagcccaatcggtataacgcaggaaactgttgatactgttcaccttttcttattggcgcttttgtggatagattctagtagtcatattgaccaagatatcaaggaagccaatagattaaatgaccttatagcacttagtcatccattagaaaaattacctaatcaagcaccagtttctgacttagtggatgctatgcaatctgttatccaacattttaacttatcaccttactatcaagacctattggaatctgtaaaaaggcaaattcagtcacctgaattaacggtagctggtcaacttttagaaatgattgaaggactttccttagaaacatttggacaaagacaaggacaaatttatcacgattatgcttgggaagctccctacgccttaaagggatatgaaacgatggaactttctacccaattgctactatttgacgttatccaaaaaggagtcaacttcgaagtgctggatgaacaagatcaattcctaaaattatggcacaatagtcatattgagtacgttaaaaatggtaatatgacctcaaaagataactatattgtaccgctcgctatggctaacaaagttgttacaaaaaaaatcctagatgaaaagcatttcccaactccttttggagatgaatttactgaccgtaaagaggcacttaactatttttcacaaatccaagataaaccaatcgtcgttaagccaaaatctacaaactttggtttaggcatttctatttttaaaacatcagctaacttagcttcttatgaaaaagcaattgacatcgcttttaccgaagatagtgctattcttgtggaagaatatattgagggtaccgaataccgtttcttcgtccttgagggggactgtattgctgtattgcttagggtagcagctaatgtcgttggagatggtattcatactattagtcagctagttaaacttaaaaaccaaaaccctctcagaggctatgatcatcgctctcctctagaggttattgagctcggagaagtagaacagttaatgttggaacaacaaggatacactgttaacagtatccctccagaaggaacaaaaatagaacttcgccgtaattctaatatttccactggcggtgactctatagatgtaacaaatacaatggatcctacatataaacaactagcagctgagatggcagaggctatgggggcttgggtttgtggagttgatttaattattcctaatgccactcaagcatactcaaaagataagaaaaatgctacttgcattgaactaaactttaacccattgatgtatatgcacacctactgtcaagaggggcctggtcaatctattacacctcgaattttggctaaactgttcccagaattataactaaaaagagttccttaggctaagcttaaggaatttttggttaaaataaagttatcccttgtcatcactagttcatttaagataaaatattaacaactacagaaagttaggttaaatattattatggttaaaaaacgctattccaaaaattctcataatctaataacattacttggtattgttgttcttgcttccctgatttcagacttttggagtgaggtgattgctactctgttaattattggtggtggttattgtgcctattacgtttatgataaaaagcgtcttaaacgttttacatcaaaccaacgtattgaagctttaaaatccgatattaaagagactgaccaagacattagacacttggaaattttaaaaaaagacaatcgttctaaggaatatatcaaattagcacatcaaatattacctcaattggacctaattcgtaatgaagcaaaccaactacaaaaagccattgagcctaatatctataaacgtatcaccaaaaaagcaaatacatttagtaatgagattaacgaacaactaataaagctacatgcctctccagaactagaacctatttctgatcaggaagatgaaatgatacgcattgctccggaattaaaaccgttctatcacaatattcaagatgaccactttgctatcttaaaaaagattgaagaggcagataacaaagctgaattagcagcaattcatcaagccaatatgaaacgttttacagatgttctggctggctacatcagaatcaaacaatctcctaaaaattttaacaatgctaaggaacgcctagaacaagcattacaagcaattaaaaaatttaatttagatttagatgaaacgctgcgccaattgaatgaaagtgatatgaaagattttgacgttagcctaagaatgatgcaaggcgaaaggaacagtaaatgagcgatacctttaattttgatattgaccaaattgcagacaatgctatcactaaaacagataaaacaacagaaattatttccaaccagacaacaagccaaactgggcaaattgccttttttgaaaaactaacaccagcacaaaagtctgctatctctgaaaaaacaccagctttggtagatacttttgtcggcgatcaaaatgcgctccttgattttggacaatccgcagtagaaggcgttaataccactgttaatcatatcttgtctgagcagaaaaaaattcaaattcctcaagttgatgatttactaaaaaatgctaatcgcgaactaaatggatttattgccaaatataaagatgctactccggcagaattagagaaaaaaccaaacttgattcaaaaattattcaaacaaagcaagacctcgctacaggaattttattttgactcacaaaacatcgagcaaaaaatggatatgatggcagcgaatgttgtcaaacaagaagatactttggcaagaaatatcgtctctgctgaaatgctcattgaagataatactaaatctattgaaaatttggttggagttattgcttttattgaatcgagtcaagccgaggctgctaatcgtgcaagccacttacaacaagaaattctagcattagatagccaaacgtccgagtatcaaattaaaagtaaccaattagctcgaatgactgaagttatcaataccctcgaacagcaacatcctgaatatgtcagccgtctctacgttgcatgggcaacaacaccacagatgcgaaacttggtcaaagtatcgtcagatatgcgtcagaaacttggcatgttacgtcgaaataccattccaacaatgaaactctcaatcgctcagttaggcatgatgcaacaatctgtcaaatccggtgtcactgctgatgctattgtcaacgctaataatgcagcattgcagatgctggctgaaactagtaaagaagcgattccgatgttagagaagaccgcacaaagccccactgtttctattaaatctgtcactgcattagctgaaagcttagtggctcaaaataatggtattatcgctgccatagacaaaggacgtaaggaacgtgcccaattggaatctgctgttattaaatcggctgaaacaatcaatgattctgtcaaaattcgtgataaaaaaatagttgaagccttactcaacgaaggtaaatctacccaagaaaaagttgatgagtcttaacttactatcatatccactaaataaaaacgatactgtaaaacacagtatcgtttttatatcattaatttataccgttttcatctatattttcctgactatctccaatgcaaaataagccttttatgctataatatgacttatggataaaattataaaatcaatttcaacttccggttctttccgggcttatgtccttgattgtacagaaactgtaagaacagctcaagaaaaacatcagacactttcaagttctactgtagctcttgggagaacattaattgcaaatcaaattttagcagcaaatcaaaaaggaaatagtaaagtaactgtcaaggttattggagatagctcttttggtcatattatttctgtagctgatactaaaggaaatgttaaaggttacatccaaaatacgggtgttgatatcaagaaaacagctactggagaggtcttagttggacctttcatgggtaatggacactttgtcgttattaccgattacgcaactgggcaaccttacacttcaacaactccactaattacaggagaaattggagaagattttgcttattatttaaccgaaagtgagcaaacaccttctgccgtcggtttaaatgtcctcttagatgacgaggataaggttaaagttgcaggtggattcatgcttcaggtgctcccaggtgcttctgacgaagaaatttctcgctatgaaaaacgcattcaggagatgccttctatttcaagtctgctagagtctgaaaatcatatagaatctctcctttcagctatttacggagaagacgactacaagcgcttatcggaagactctttagccttctactgtgactgttcaaaagaacgttttgaagccgctctattgactttaggaactaaagaattgcaagccatgaaggatgaagataaaggtgttgaaattacttgtcaattttgcaaccagacttactatttcacagaagaagatttggagaagataattaatgactcaattaaatagttcatttatgattgggaaggttgaaattcctcatcgtaccgtactagcaccgatggcaggtattaccaattctgcttttcgtactatcgctaaagaatttggtgctggtctcgttgttatggaaatgatttctgagaaagggttactttataacaacgaaaagaccttacatatgctccatatcgatgaaaatgaacatcctatgtcaattcaactatttggtggcgatgcagaaggcttaaaacgtgcagctgactttatccaaagtaatacgaaagcagatatcgtagacatcaatatgggatgtccagttaacaaagttgttaaaaacgaagctggagctaaatggttacgtgaccctgaaaaaatttatcatattgttaaagaggtaacgtctgtacttgacattccattaacagtaaaaatgcgtacaggatggtctgactcatctaatgctatagaaaatgcactcgctgccgaatctgctggtgtatctgcacttgctatgcacggtcgaacgcgtgaacaaatgtatactggcacgtgtgaccatgaaacacttggcaaggtcgctaaagctgttactagtattccttttattgctaatggtgacattcgtactgttcacgatgccaaatttatgattgaagagattggagctgacgctataatggttggacgtggtgctcgtagcaatccttacatctttacacaaattaatcatttctttgaaacaggcgaaatccttcctgacctaccatttgagaagatgttagatgttgccgaggatcatctcactcgactagttaatttaaaaggtgaaactattgccgttcgtgaatttcgagggttagcacctcattatctgcgtggaaaatcaggcgcagcaaaaattagaggagctgtttcacgtgcagaaacactagcagaagttcaagaactttttgcaggtttacgctaaatcaaaaacagtcctttgactgttttttcctatctctgtacaaatttagcataaatcattgtgtaatgaaaactcaaaagtataacaaattattttagcataacagaattaaggagaattatgttgattgttttagctggaaccattggagcaggtaaaagctcccttgcagctgctctaggacaacacctagggacagatgttttctatgaggcggttgataataacccagttttagatctttactatcaagatccccaaaaatatgcttttttactacaaatattctttttaaataaacgattccaatctataaaagaagcctataaggctaacaacaatgttttggatcgttctatttttgaagatgaactattcctcactctaaattataagaatggaaatgtgactaaaacagagctagatatctataaagaacttcttgcaaatatgttggaagaattagaaggtatgcctaagaagagacctgatttgctagtctacattgatgtttcatttgataaaatgttagaacgtattgacaaacgaggacgcagctttgagcaagttgattctaacccagagttatacgactactacaaacaagtccattctgaatatccagaatggtatgaaaattacgacgtttcacctaaaattcggatcgatggtaacaaacttgatttcgtcaaaaatccagaggatcttcaacacgtccttgacactattgattccgaattgcaaaaacttgatttactataattaggtgatatctatgattataagacctgtcctaccctcagatgctaaagaattacttgctatctatgctccctacgttgctgacactacaataacgtttgaatacgatattcctagtatatcggaattcactaatcgtatcaaaaatatcagcaaatctttcccatatttagttgctgaagaaaatgggaaaatattaggttatgcatatgcttcaacttactacgctagagctgcctatgactggacttgcgagctttctatttaccttgataaagatgcacgtagcaaaaaaattggtagccaactatatgatacattggagaaagaattagttaaccaagggtatgttaatctactcgcttgtatcagtttaccaaatgatataagcattgcattccacaaaaaaagaggatttaatcaagtcgcacatttcccaaaaatcggatttaaatttgaacaatggcatgacattgtgtggttacaaaagcgattgaaatcttaaggtaatctttagatttattttaagttagcaaaagattaggatattataatatatttatcctaaaatttttcaacgactttcagtcgtacctatatctacaagtgcaattgttagatatagatccttttacttttcataaatctataagaaaatgtccaaaatattttggacgttttctttttatattaaaattccagtacccatcggtactggaatgttttatgattttgcaatatcaaatttcaatttgcctttggatacgccaatcttaattacttgcccctctttcacttgatttgccaatagtagttctgataaatgatcctctacttgcgtttgaatagttctacgcagtggacgagcacccatttctatatcatagccatcctctgccaagtgtttcaaggctgaaggctggaatttcagatccatacctttatctttaagcgctaaaattaaaggtttaaccataattttcacaacttcacgcatattatcttgactgagactatggaatacaactttctcatcaatacgattgataaactctggtcgataagcttttttaagctcctccataatacgtttttgcatagcagtataatcatggctgatatccttagctccaaaaccaactgttttatcgtcacgtaatgcagttgctcctaaattagaagtcataatgattatagtatttgaaaaatcaacttttcgtcctcgactatctgttaaaacgccatcatcaagcacttgtaataatacattaaaaatatctggatgagctttttcaacttcatcaaaaagtaaaactgaatatggtttattgcgtactttttcagtcaactctcctccttcatcataaccaacataacctggaggtgccccattcaggtgagaagctgcgaatttttccatatattccgacatatcaaaacgaattagggctgattcatcatcaaacaacacttctgccaaggcttttgctaactctgtcttaccaacaccagttggtcccaagaacataaaggaaccaataggacgcttaccagtacgaatgccagattgattgcgacggatagcacgactaatggcagtaactgcatcatcttgaccgataacacgtttatgcaattctttttctaaattgaggtattttttactatcagcttgtgtcaatttttcaacaggaataccagatagacgactgagagttgccataatatgatcttctgttacggcaataggcttacgctttttacccttataacttgcttttagagctttagaagcagatttcatatcatcatctaaaatagcttggtcaacttctgttaaaagcgaaggagcatttttcttaatcatcatttgcacagtggcagaagcttcatcaagtaagtctatagctgagtctggtaaattcttacttgtcaaataacgatgagccacttttacagcagtcataactgcttcatctgaaatagtaacattatgaaaggcttcatacgctggcttcaatccaagtagaatttcatatgcgtcttcaagatttggttcttctactaaaacttttgcaaagcgacgagataaagcagcatctttttcaatatgcttttgatattcctcttgagttgttgctccaacagtgcgtaaagtgcctcgggccaaagctggttttaaaatattagcagcatcaagtgtgctatcaataccagagccagaacccataatagtatgcagttcatcaatgaaaagaataatatgaccgtcttcttcaatatctgcaatgatttgattcatacgttcctcaaaatcaccacgaaaacgagttccagcaacaacgctcatcatatctaactctagaacacgcatatctctaagctcataaggaatatttccattagcaatacgttgtgctagaccgtacgccaaagctgttttaccgacacccgcatctccaactaagacaggattattctttgttttacgacttaagacttggaccatacgtgaaatttctttatcacgcccaataacaggttcaatttccccatcaaccgccatctgtgataaatcacgtgtgaaatcagctaaatcaccagcagtactcggtggtttcatcatatcagaaaaagaagcacccgactttgcttttttaggattacgtaattcataaattgctttgatatcatcttttgtaaaaccggcatgacgttctagagccttacgtaaatcaaccatacgaactgattcaccatcgtcttgacctctaaagccaactaactctaagatacgtgtggctaataaatctttattaaccaacatagcaagcaagacatgttcagtacccacatcttcagctcctactacgatactaatattttctgctaactttaagatctttttcaaagctggtgattgctctaaaaattgataattggtaatctcttctttcggtgctctacctaaagctaaaattgttgctgcttcgtactcttcaattgcaacttcagactcatattcagcaaatgtcaaaccagctactgaatcatgaactaaaaccattgctaaaagaagatgccagctttctaaatagtgactttcatagcgtgctgcttgaaattgcgccaatctgaatacttcttgtaattttatggaataatgactcataaatggaatccttttctatctaatcgttgtaataatttacggagcatacgagctctaataacagaggcttgctctcctaagacgtcatcacctgatgtcgccagaatcaaatttccttcacgttctgtaattatctcttcatcgaataataattgaatcaaatcatcaaaaacttgttcactgatacgctcgccaatcgttgataacatatttccaaataattggtgttgatcagaaaaatgaaccttagcaatgcggatgtaacctccaccacctcgtttactctcaaccacataaccacggctttcagtaaaccgtgtcttaatgacataattaatctgactaggaacaacttgaaaagtatcagctaaattggaacgctttatttcagcaattcctgattgttctaataatgattttatatattcttcaatattatcggaagtattttttatggccacaaattcactccttcctctttgactataactgactattattatatcaaatttttaaaagatacggaaatgaaatctatctaaggacagtaaaactagaatgaccgcggattttagttgtcattactagaaagataagataaaatggaataataccatagaaaggttttatttaatgaattacattattacatttttgatttcaatgattcccttagtggaactacgaggagctgtgccatttgcaatcgctaatggaatacctttgtgggaagcgctagctatcggtgttgttggaaacatgctacctgtacctatcatcttcttctttgctcgcaaagttctagaatggggagcagataaaccttatactggtaagtttttcacatggtgccttaaaaaaggacatagcggtggtcaaaaacttgaaaaagtagctggagaaaaaggattgtttattgccttgctattgtttgtaggcattcccttacccggaacaggagcctggactggcacgcttgcagctagcctcctagattgggaatttaaacatagtgttattgctgttatgctaggtgttatactagctggatgcatcatgggaacattatccattatcggcttcaacctattctagaaaagttaaggtgagatgactgtctctcctttttaatatttgccaatccaccaattcgatagcaaaataagacacttgacttaagccaagtgtcttattttaaaatatatttactgacaacattttgctgtcaaattataatataaagcgagtgttaattatttttcaagtgctgctgccattgtagctgcaacttctgcttcaaagtcgttagaagctttctcaataccttctccaacttcaaaacgtacgaaagcaactgctttagcatttactgactcaagataagcttcaactgttttgctatcatccatgatgtaaacttgagcaaggagtgtgtactcttggtcaactttagtgttgtcaagcatgaaacgatccattttacctggaacgattttatcccagattttttctggtttaccttctgcagctaattctgctttgatgtcttcttctgcttgggcaataacttcatcagtcaattgagcttttgatccatatttaaggaatggaagagctggtttgttaaccatagcacgactctcgttgtcttgctcaattttgtggttcaactgtgctaattcatcatgaacaaattgtgcatcaagttcagtatatgaaagaacagttggcttcatagctgcaacgtgcattgatacttgtttagcaagtgcatcgtcgccaccttcaacaacagtaattactccgatacgtccaccattatgttggtatgcaccaaaatgttgctcatcagtcttttcaactaaagcgaagcgacggaatgaaattttttcaccaattgtagcagttgcagttacaaatgcttgttctaaagtttcacctgaaggcattgttaaagcaagtgcttcttcattgtttgaaggacgtccttctgcaataactttagcagtttcattaactaatgttacaaattggtcgtttttagcaacaaagtcagtctcagcgttaacttcaataactgctgcaacgttaccatcaacataaacacctgttaaaccttcagcagcaacacggtctgcttttttagctgctttagccatacctttttcgcgaagtaattcaatcgctttatcaaggtcaccatcagtttctactaatgcttttttagcgtccataacgcctgcacctgatttttcacgcaattcttttacaagtttagctgtgatttctgccattttcgttctcctcttaatttcaaataatgattaaaaaaacgagacagagcggtttgcatctgccccgttttaggatttacaataaattaaatattagtcgttgtttgatccttcaactacttcaacgatttcttcaattgaatctgcttgtgcttcttgagcgaagtcaacgtcagcatcttcaccttgacgaccttcaataactgcatcagctaatttagaagtaattaatttaacggcgcgaatagcgtcatcgtttgctgggatgataacatcgatatcatctggatcagcgttagtgtcaaccatagctacaactggaataccaagttttttagcttctttaacagcgatttgctctttatgtgggtcaacaacatacattacatctgggatgcgtggcatatcttcgataccacccaagaatttttcaagacgtgcacgttgtttgtttaacaatgcaacttctttcttaggaagaagttcaaaagttccttcttcttccatacgtttgatttctttcaaacgagcaatacgtttttggatagttccccagttagtaagagttccacctaaccaacggtggttaatgaagtattgaccagcacgtttagcttcttcagcaacagcttcagctgcttgtttcttagtaccaacaaacaagataactgcatcgtttgctgcagcatcacgaacaaattcgtaagcttggtcagctaattttacagtttgttgaaggtcgataacgtggataccattacgttctgtgaagatgtacttagccatcttagggttccagcgacgagtttggtgaccaaagtgaacaccagcctcaagaagttgtttcattgaaattactgccatgagtaagttctcctttaaaaatgttttttcctctctcagacttcgacttgcagcctaacctttcggcaacaagaccacaattgatctaagatgagtatttgtcactttaagcaactataatagtttatcaaaaaaagttagatttgacaagctataaaatcttctactctattagaaaaatcatacttttcttagaaaaatgtaaacgtttttattggagatttaaaagtatttcgtttataattaggctattaaaaaataaaggaggacattattatgtcattagtcggaaaagaaattattgaattttcagctcaagcttatcacgatggaaaattcatcactgttacaaatgaagacgttaaaggaaaatgggcagttttttgtttctacccagcagacttttcatttgtttgcccaactgaacttggtgaccttcaagagcaatacgaaacacttaaatctcttgatgtagaagtttattctgtctctactgatactcattttgttcataaagcatggcatgatgactcagatgtcgttggtactatcacatatcctatgattggtgacccttcacaccttatttcacaaggttttgatgtccttggacaagatggtctagcacaacgtggtacatttatcattgatccagacggtgtcatccaaatgatggaaattaatgctgatggcatcggacgtgatgcaagtactctcattgataaagtccgtgctgctcaatacatccgccaacatacaggtgaagtttgtccagctaaatggaaagaaggagctgaaactttaactcctagtttagaccttgtaggtaaaatttaataaccaggaggtaatccatggtcttagataaagaaatcaaggctcaattagcgcaatatttagatttgctagaatctgatattgtattacaagctgatttaggagataacgataattctcaaaaagtaaaggattttctagatgaaattgtcgctatgtctgatcgcatcagccttgaatcaacacatttaaaacgtcaacctagttttggaattgcaaaaaaagggcatgaaagtcgcgttattttttcaggcttgccaatggggcatgaattcacatctttcattttagctttgttgcaagtctctggtcgcgcaccaaaagttgatgaagatattatcaaacgaattaaggggattgagaaaactatcaatctagaaacttatgtttcattaacttgccataattgtccagatgtcgttcaagcctttaatataatggctgttttgaatccgaatatcactcatactatgattgaaggaggcatgtatcaagacgaagtcaaatcaaaaggtatcatgtctgttcctactgtttataaggaccaagaagaatttacttctggccgtgctacaattgaacagcttttagaacaactagatggacctcttgatgctgaagcatttgctgacaaaggtgtctatgatgttctagttattggtggtggtcctgcaggtaacagtgctgcaatttatgccgcccgtaaagggttaaaaacaggtattttagcagaaacttttggtggacaagttatcgaaacagttggtattgagaacatgattggtacactgtacacagaaggccctaaattaatggctcaaattgaagagcataccaaatcttacgatattgatattatcaagagtcaattagcaactggcattgagaaaaaagaattagttgaggtaacactggctaacggagctattttacaagctaaaactgctatcctagctctgggtgctaagtggcgaaatatcaacgttcctggcgaggaagaattccgcaataaaggtgttacttactgtccacattgtgatggccctcttttcgaaggaaaagatgttgctgttataggtggtggtaattcaggtatggaagctgctttagatctagccggtgtcactaaacatgttacagtcctagaattcttacctgagctcaaagcagaccaagtactgcaagaacgagcagctaaaactgacaatttaactattcttaagaatgttgctactaaagatatcgttggtgaagatcatgtcactggtttaaactataccgatcgtgatacaaacgaagaaaaacacattgatttagaaggtgtttttgtacaaattggtcttgtaccaagtacatcttggctcaaggatagcggcattgaactcaatgaacgtcaagaaattgtcgttgataaatttggctcaacaaatatccctggtatttttgctgcaggtgactgtacagatgctgcctacaagcaaatcattatttccatggggtctggtgccacagctgccattggcgcatttgattatttaatcagacaataatctaaaagagattgatacaatgggtatcaatctctttttttgggtaatatgaggaagtttaagggctaaaattggctattttacgaaagaggcttgacgaatcttttttttttcgatagaatattatctgttatggcggtatagccaagtggtaaggcacggctctgcaaaagcttgatcgtcggttcaaatccgtctaccgcctttcagtacctgaattaacaggaattaaccgaatgaaaagcctgattttataggcttttttgattttccatcaggttaaatcaggctaactttaaaaataatttggggcgaatttggggcggacggtttttcataggtcaatttttgaaaagtattactatctattttcataattttttatacagaaaaaagcggccatcttgaccgctctttcttatacttgcaattcctcacggattgctttttgcaacagctggctaaagttgaccttgttttcttttccaacttccacaagccagcttggcagtgtgacagtcttgttgacaatcttagagcgttcacgctcacggacaagctcagtatcaactgaaatagcctgaatcacatcttcgtcacttgctaaattgcttgcaagagccttgaatgatgatgctttaggaaactctttgccctcgtcttcaaacataattgtatagatttcaaggacttcacgagcgttaaaaatggcctcgttcaagctatcagcttcactaaatgctccatgaaaatcagggaaagaaatgttatagccaccgttttctttatccacttcaaacaatgctaaataagtgtatttcataatattagattaagccaatgatcagagtatccccttttaggggtacggggaggagcgtcctcactccccatacaagactttgagaatgttgttcagtgtgcctggtctgtaatctttttcctttggcttaggtatcgtcactgtccgtccgtctggatgtttccaaacttcgtgtgaccctttgccaaagttagttttactaaaaccttgcttcttagcaattttcttaagctctcgctctgtcattggcttatctcctttccttatctttaattgtattatacacttgttttaaacacttgtcaatagaaaacacttgtttttaacaaatatttttaaaatttttaacaaaaaaagtccattataaccgatattttgagggaagtccgttataacggaaaaacagcccccggcaattgctgagggcttattttgtcttatcgtatctaattctaaactggctttttagtcagttcataagtgataccgttgatggtaacttcaataccttcaatagtaatgtcaatcttgtctttgctaccgtcaccaatgtcggtagctttatcaaacttgtccagtgaaccattttctgcctcaatagccttgaggcggcttgaagctccgacaatatagctatcaaagccgcttgcagcataatcatagacagcaccgccaactttaaacattcccttgatagcctcactgaaggttttagcaccagacaccttgtaagagccaccagcccttagaagataaaaccagtctgtcagaaagtcatccacgcttgcatagtgcatatagtgaccgccctcatttgaaggacgtgcggaaccttgtgtgacagtgacaccgcttggacggttgccttgaccagtccaggtcataccgccccagttattatctgccttcccaactgctgaagttccccaaagaccttcatagtgtaggatagtcagtgcataacttggaagaatatcatgctttttacagttgcccagaatcttgtccagcaccgcttttttcaagatagtcccattgaaagagaggtcgccctcttctttggtggctgtggcttgtccagttagctctgtttggcttgttttggtttccgtgggcttgtttacctcttgagccttaaacggctcagagggctgttttttgagcaattccgtcactcgtttctgaactgcatcatattgactaccaagcgactttttacgagcttcaccgttgccatgtttgccagcgattacctcttgaacaagttggtcaacagtcttttgattagtcgtagttttgccattgatgactgacataacagcctcatattgattgccaagcactgccttgcgtgcttcgccattaccgtagttaccagcaagggtttccttgaccaaggtatcaaggctttttccttgggtagaagctccgcttttcaaacggtaaacgtagcaatacatccagccactagcagccgctgtctgattgtagttgttcactgtgatgccattatttgcccagttacagtgaatgatattttcagggtcaataaacatgactacatgaccaccagctccgcttgagtgccctcgcatgccccaaattgctatatcaccacggacagcattccaatccacgttttcagcaataagctcataaccgtttttaatcagccaatcgtgcatgtactcagtgttgaccgcccaacctgctgagcttgcaccagctgacctgagagcataatagacagagctggaacagtcatagctgttagggccgtcacggtagtccatggaatagctgaccttgccttgacgtgcagacatccaggcaatggctatttcagtgttgatttccataggttactccttccaggcatcgtgcatttgtttgacagctgattcaacaaacaaagtgagatcatcgtctgacatgtggatattgtatttttgcaactcagctaaaatctgagccttagcagaagttagcttgtcagctcctttgaagccagtttcagtggccacttgctccacagcattaacagcgttcttggccaagatttctgtaatcaagacggccttttcaccgccttttttaatcaaataaaccttgacagcttgcactgcaattcctgccaaaatggtcaaaattcccatagctgagctgatgataatatctgtaatttgtgtcatgtttagtcctcctcaattggtaactgtttgaatttctcaaacaaggcttcaatttccccatttccgccaagcagttgataactctcaaagagaatgctcaactccctgaaatgttcaatagttgtgtagccttgagaaatttcctttgtcaaatcgtgaaaaagacggtaacgctggattttaagcgtaccgtcttttgtgatttctgaaattttctttgtttccgtggttgtatgatcaatcgtcttaaccttgtcaatcaagccagacaaatcttccttgatatcctcatactgatgttttatcagctggtctttccgattggctgaagtggtgataatagtgctgaacagaccgcccagcaccgtcaccatcgccacaaccacagtgctatctattaaccatggtggcattcactatctcctatcctgtttattttagatgagcttacttatcctccaagtgaggctcagtccagtcaggatttccgttctcatcaaaggtcatgatgtagtattcaagattaaagaaatcagctatgttgattgtgggtgttgtcccgccccattggttaaatgcccagacagtttctacgtccttgaattgacggcggccattgacgatgacaggacgtttctgcatgtcacggtacatgtagaagtcattgacagcattcttgcaacggatgaactcaccattttccttcatgtacttgagtgctgtcgccaagtcaaagggttctgtgattgtttcaaggtcaagtaaattattttctgttgtagtcacggttattctccttcaatgatttctggttgagtttgttcatcaagcaagccttctagttcggaaactcttgcttgaagttcagcattttgctgagtcagttgctgtttctcctgaacaacttcagtcagctggatagccagcaagttcttagtggttgactcattggccaactgggctgtcaattcattgaccgtcaagcgtagcgcttgattgagttgttgttcttggttcatgattgttcctttctagttagaaccctgaagggtagtaagtgtaagagtcagcatttgggccttttgagaagttctcattgaatgagttcaaaatatctctgagagaagaataggatccatttccttttaaaatccagacatcaccaacctcaattcggctattgcgttcagcagccctattgtgtggtgtgattttcaagcctgaatcaagtgtccgaacatcccaaccatctgaattgtcaaaggcagagcttgctaatcggatttcatcaccaactaagtcaagtgagtcaatgtttgagccgttccatgcacggactccaacaaatccaccatcattggttgattctgtaccgtagcggttagaaccaatgaccgtaacaccagcatttcctttaccagatactgtaccagttgcgaacttaacaaactgagtaggatagccactcaaaacccgtttcagtgcagcttggtcagtgtagtaaagtatctgaccactgttcatctggatttccatggcattattcaaagctttaataacaccgcccgaaatctgactggcagatattgtcacggattgaacctgagtgatgaaggctgacttggcaaatagttgcttcaagtaggcatcgttggccatcaacttgttaaagaaagcttggtcgactttaagtttttctgccgttacagcttcagctgctaaaagcactcctgtgattgctccagccttaacatgtcccgtttcgacagcgcctgttaccaacttacgactagttacagaaccatcaaccaacatgttcccgctaacttttatcagtgagctaaacagagctatagcatcaggagtgaccttaaagtaagagccaatagctcttgccacatcattactcgtcttgcctgctctcaggacaatcccttcagaagtcatagtaatatcagtttgcttaagagttttatgatcaagacttgttacactagctttaatctcattagctgtctgttcaagcttagtatctgagtaggctttcaggtcatctggagatggactccagtccgcaggaattgtccccttagtcacacgaagtgttgtcactctaaacttaagttggctatccgtaaatctaattttaagggagtttgccctgaaattggcattgtttgccacaaaagatgcggtataggtaccacgatttgatatcgttctctgtacctcaccaacccgttcgattttgcctgcatgtccgtatagctccagttcataagaaccaaaagccgtccgactatccgcaaaatagttaaatgcaatagttacagtatctcccatttcaatcccttttacggctaaggtagtaccgaagctataaaggtcatagacggtagtccctgaaacgtttagatagacatctctttcagtccccaaagcatagttctgtgtccctgatgacagactttcaaagcgtcttatcaaacctcttgcattttcctcataggttgacttatccacataagagccattaacctctgttcgtaaggctgatagctgcttagcggtttcagacttgcttgcttcaaagtaacgactagctcgatttggttcactatctttataggtctcaagactaactaaacgattgctaaaggattccgacgtctgcctaatgctagactcagcacttgtcagttgacctgccaaggtttccgtacttgttctaaggttggctaagttttcatcaacggtctgcttgtattcggcgaagctagcttttaaggtttcatcgcgattattccagtctgtagcaacggtaccacgttccagcttaactttcgagagcgtcaaggggttagcatttgtcccccgcatcacaagccaggcttggtttctagggtcaggcataacaccacctaaatcaaagctctgagagataaagcctttccctggagataagtcaaagttaggcatgacaataattgtaatcttactagtgtccccggtgtgcatctttttataaagtctaacttctaaacgactagttgattctgcttcatagctaaaactcaaggtcgcttgactagttcgttcgagtagttggggattaatatcataggtcttaccatagaagttagccattagttctttaggttctccgccgtcaatgacataattatagccaccaacagagaatgactccagtttcgtgctaagtcctgtcagtttatcctcaacccgctttgtcgcaagttgttggacgctatcagcttcctttagccttgtctctgcgtctctaaggtcgtttagggctttttgcttaatgatatccatattgtgactaagatttgttagagagatttttacagcttctgtgcttgtgacttgtctatttaattcagctctaagctctatttcttttctggtcaagtctgcttgtgcctgactggctaaattcttagcttctgtcgcaaggggaagaagctgattatccatgcgattagatagttccgatttaaagctttctactttggcttttgcgatttcgatatcatcattaatttttgtttttgttttaccaaactctgcatcaaaggcagcgttagcatttttcacagccctttgaacagcaacgtcctgagctgtggcacttgctacaagtatagcatcagcaacattagacaagccacttgacaccccagaaccaccaactcctggcttatcatcaaaagttatggagatatactcttccgttaaagcgttaaactcgtaggcaatggccttcttgtagaggtcagcactgtgctttctactcttgaggttaaccgtgtcgcccagatttacaacttgaccgtcaagctcataggcttcaatctcaatggcatcagaaaccttatcaatgccctcatttgtaaacttagcctcagcccactttctaaggtcttcaacggtttcagcgttgttgttctcatactctttctcattgatgtagggataagagtttattagtggactgtcaacagacactctgagcgtcacttcatcttcagctccatcaggtttgaaggttgaccgtgcatgaatccttgtgacaacaccctgagagttcttggttcgttgataggatttgaggttcttgtgtgttgtgatgacaacaccacgatcagccccacggctacgtttgatagataaggcaaagttatcacggacaagctcaccttcccacgttccaacaatactgtgtttaccgtccataaggacagagtagagcgtttccgtttcagtcgtgttaaaggttcggctgtccataatatcgctggtaaaggagaaatcacctagcccagtcttagcattttgaaccatctgagacagtgccatagcacagccttgaccaaccacactcacaggagtgatagaccgcttcatgatgtcatcagagacatgataggcagtgatgtccatgctgtcgtcattctcaataggcttcttgatacggaacagctgagcgcccagcacaggcacaggcgacttaatcagcatatcctctttgataagctgatagatacctgaatccgtgataggatagcgaacagtcaggtagaaatcaccgttggtttcttctttgacaatggcagagctggcttcatgtagtggaatgccattccatttgaccgttcttacatttgcatcaagtaaaaagagcaactatgcccacccccaaactgtttcaaatttcaaagatgttatgccagcacctaaaacaacaccgacattctgccccttagcagtatcaactgtgataaaatcaccagcccacttaatgagttttccactagccgtcttaaagctaggattgtcaggatcattggtcatcacgagcgattctgagagcttttcaagcttaatcacttggttacctatcgtaaacgatgtctcagaagcgctctgaccaaccactgtaatcttcggaaaagcaagagctgacccttgaaccctcaaaaccccattaccagtcaatgtctggatgtcagtggtcttgaaaaacttggtagggtggcagatgaaggtaacatcgaccacccaggcaccaaattcgtcttttccaatctcaaagctatcaaccttataacaccaaagcctaatagttggttcctgttcattttccaaccaaaacttttcacggttcaaaagagcagaaaagcgataaatttcttcatcgcttggctcaattaaagtgatatgataaggcttctcaattagtccacggtgtctattcgattgcacaactgcaccactaataccatcatgctctaatagagctgttttggagctggagacaatgacatttggtctagtttcaaccaatacatcacacttaaaagatgatgttttcacaccgtcaatggtaagttcattgatttttgtcatgccattcctcctctcaaattagttttacgttgcaattcttcagcaatacgatttccaaccacgttggctagtctgttaaggtcagcttcttccctgatagtgacgccagagaagttaacgttaatattgttcgatgtattcatcgtgttagcaatactttgaccaattgcccccagggttgacttattcaatggcaagatggcttcagcgccagcctcaccgccaaccattgcacggtttccattcatgccaaatagggttggtttggtcatgataccgcccttggcataccagtcaatgccgatacttggtaagccaccttttagccaatccagagggttagcagaaccactcacacggaagtgaggtagtggaatatgaggccatttaatctggaagttaaacagattcttgatggcattgaccccgttggacactgcatttttcgccccatctattgcattggaaatagtggattttatggaattccaaatattgcttgctgttgaaagtatcccattaaaaattcctgaaatcgtgctactcaaattattaaacaaatttgacccagttgagaccagtccagaccacaaattggaaagagtggaagtgaaacttgaccacagagactgagcacctgtaatcaaacttgagaaaatattggacaaggaactagtaaagctagaccacaaagactgtccagttgagactactgaagaccaaaggccagaaagccaggcagtgaaatttgaccacgctgtggtggcagtcgtgactatgttagtccacaattcagaaagccaggcagcacaagaatcccacgttgactgaagccattcagttatggctccccagttcatgattgcttggatgataagtgttatgacggcaatagcccctactattgccgccactacaattccgacaggcgcacctattgcccctatggcgatgaccagcggtgcaattgcaccaagcaacatcatcacagcagttgtaactaggccaagaatcacgatagtctgttgatcagtttcgtttaggctagtaaaccaattgacagaagattcaagcatacccatcaaaggttctaaagctgggatgacagtctcaagcaatttaccgccaagttctgccattccctcttttgcttggttagaatactgagtcaacttatctattgggtcaagcgtctcatcaaatgtggtggagacagtaccagaggaacttttagctgcttcagctaagtcatcaaagctaaaagcaccacgctgaatagcatcgaccattctaggagcagccttactaccaaagatttctgaggcaatacttaaagcctctgtctcactagtagaattttgaatagcactaacagtctcattcaatccatctgtcagagtcttaccgtctttagcatagatgacagcagctttcgatagagaggatagagcagcagatgaatccacaccgcttttctcaaacttaccgatcagtgcagcaccttcttcaaaagaaagtcccaaacctttaatctgaggagcaccgtcaatggctttttgaacaatcgtgtcaactgactgtcctgtatcttgagcggctttggtcacattgtctaagaccattcccaagtcttcagctgtcaaaccgtaagcttcaatagcttgttttgcagaaatggcagagcttgaaatgtctgtttcgttaatctcagcatacttgataagtaattcagatgctgatttcagcttttccccagtcaaaccgaactgagtattcaattccccaacggcatcaccagcattctgaaagctggtaggcataccagtagcaatgtctttagcaatttcctgaagctctgctaaggcatcaccagtcagaccagttttggttgtgacggtgtccagagcctcatctatctcagaccaagcatctactgtcattttcccagcgtcaaccattttctggccaatctgaccagccttatctgcaacatccatcatgacatcagctcttaaatagctggttgcctctttgatgtctccagttgcagaacggcttgactcaccaagaatgtccattgcacggtcaatctttagaacttcaacttcagcttgaccgatttcattttgaagttgacgccattcttctgtacctattttctcatcgccaagggcagcttgttttttctttaattcttggactttatccccagccaattccgactgtttgccaagtagtttcattttttgctctgctagttcgacattgtcagggtctagctcaagcttttgattgacaatatcaagctctttagcaacattatcaagttctttgttaagattcagaatagactttgggtctcctacatcttcaatgtgtttctttgttgactccattgccttatcaacaatcttcatctgtgattcaaccttagcaatttcaagttgaagcttattccactgtgctgacccaacttcagattctcccagtgccttctgttgctttttgagttcagcaatttttatagcaccaacacgagcctgttcttgcaagttaaccaacttacgattcaacaagtcaacattgtctggatccatcttcaattgtctgttgatgttattgaagtcttttttcaaactagataaggcagtgttgataccttttacagacctatcaaattcaacagtattagcaccaaatttgacgtataagccttcaaacgtttcagtcatagatttcctcctttctttttaatctgacatcacgctaagtaaatcagcgttggataaggttttcttttcttcctgattgatgctcatttggtgaagcgttcccatcaaatagttaaagtgttgggattctgcccaaaaaacatccatccgattttcaaagataaccttataaaccttttcggaagttacaacttctgaagaggcttttttttatcttgcggcacctttgctctgcttcggttaaattcatagaagaggtctgagaagaaaccaatatcaatcaaatcaccaaaccaaggagctaatgaagctgtttcagcggtaagctcattttgtactaaacgtccattttcaacctcaccataaaggcaaggaatgacttcagtcaagaagttcatgaaatcaggttccataagtagaggcatcatcttgattttctcttcatcagttaaatcagataggttacagtttacaccagttgcaagagcaagttgtgtatatgctgtaagtgctttttggttgtcatcaaagaagttacgaccagttcgctgttcatacatcttgatagctggtaaagagtaaagaaagcgcactgtttcagtgtgctctctttcttcaccgtaactatcaaacgctgtgaatgatagttcttttttaatcattaagagcctccgctaacagttgtggtaggtgtagtggttgttccaagcgcttcattgatgaaatcaatcagcttgcctggtgacttgtcagcaaacaacttgtcaaacttcccacggacggttcctttgctgtcatcacgccatacaatttctgatacaggtttcttttcagaatccacaatgaagttatttggagaggcagtacaagggatttcaatttcttttggtgtcgctgatgtttcatcagttgatgtgctgcctttaggtgcagatgccttaacgttcgtccaaatgtggaactcttcaatctcagctccaaactcatctgtaacagtttcagcataaccccaaatgaagttagtattgacaccagtatcaatcaaagctggtggtgtagagttcgtaagctttttacctaagtgatcaatcataaactgtttaggaatctgataggttgtaatagacccttctgtggattttttaccttgcaaacgaacatgttccacattgtctgcatagtaggcatttgattcctgagaagtttcaaaggatgtgcttcgtagccctgtaaagggataaggtttctgcaagtctaaggcaccagcatcagttttagcaattttggcataaaaaccattcgcattaccgtgagtgacttcccttgtatcgtattgataagtcatgtaagactcctttcttatttaggtgtgattttaatggatttcatatcattaaggaatttctccttattcttgaggtaggctggtctgatatgctctctaggggcaacaaagccaccgtttttagtggcatgaccattctctaataggtgggatagagatttttctttgccattattatgaacaacagcggcgtcatctatgatgtcgtgtgtccaacctttttcgtaaacaccgtttcgtctagggcttccagttctaatgtcattttctgtactttgggcagccttcttaatgttctctaaaacttgattcttgatatccacctttagcggtgtcatcttcacgctaccaccgcccatttgtaaacacctcaagtctgtaagttgtcagtagatagtcagtgtcaggttgttttagattcaattgatttggctcacacataaaattagacagcatcaaattttcaatgttgtctagtttcttcttgtggtagtgactaacttgcaaagtcacttttctcatgtgcactctatcatcagcagtaatgctactgcctggtgttaaccgataatacaagatgacattgtcaggagaagatttctcctcacgttccatgtagaagaccttagccttcaaagggtttgtttcaaggatagattgaatatcttgtctagtgaaaaatttcttggccattatttcagttctccaagttcgatgatagtgtaatgaccatcatctgattctgtcccaatgttaaccttgtactctttgccattatatttgacatagtcaagagtgtcagtcacatagttggaacgaacactaaacctagcagtcagaacttgaccgtctgccatagctttatcaagccttcgctgatagattttctctttctcagctttgactttcttttctacggtctttttctcccagacacctttttcaacctcaacacgctcatcatagcaaagaatgatagctactcttgaagatttcatgtcttcacttcatagattgccttgagttgatacaaaagatttgtcatctctccgtcaatccattccatagtagcagcactgcctgtcatcaaagatttgtcaaaacgttgaacgcatctcagatgtaaccagtcaagcactgtctccctatcttcttccttaatgtctgtccatccctctaactccgtttctttatcgatacggataacaggaatagcatttctttgtaaatatgaaatcccactgttgatatatcgtaaaagttggacgtcaaagatatcctcttcaacgtcaacttctaccatttctttgattgttttaaggattgtcattcagactcccctttctatatttaacctgctgggtttgtaaacttaaccgctgatttgtactgagccaaacgaccacccataacactagcaagctcaatatgacggcggttgactgttacatcataatcatcaaagcggtcagcggcagcctcatcaccaatcatcttataagcttggtcagcaaatgcaatgattgggttagttgcaccgtccatccagtcatagatgtaaacttgaaaaccagcaataacatttccgttggttgcaattggagcaaatggttgaggatcgatgtagcgaccttctgcatctttgaccaatttcaatttacgagcaatggcttttgaagtgacaagaattggagtagtatttggaaccatcttatcaataccagcaaccagcgtttcaagaacagcattgtcaaatacaccagcaacattgatttcttgtgtttcaaagagattcgcttcagtttcttcagcaattgatttgatttcagtgattttgtcttcagcactgttagattttccatcaccaatgacaacagcacgttcaatagttcggatgaagccttgagcaagttctttcatcacatagttgaagtaagcgcctgttgtatctttcttcaagtcagaatattcaaaggcatatttgatataaactgtcgcagagttgatagtgaaatccaagaatgtgaagtcttcatctttcttagtcttaccagctttgtgtcctttagcttgagatacttgagtttgaagagcaacacgcaccgcataacgtggatcttttgaaacgtggttcaagatcccattatagttagtaaaggcatcttgaatagcgataagaacaggttctggaagaatcttagtgaggttagtcactcctttttcaacaaggttagcttcccacgctttacgggcactgtttgcgctaccttcgttgtccatcagaatacggacaaagtcaagagcagcggctttggttttcaaataatccataggtgtattacctttctgtttttctttaatgattttagcagctttgctgagttcttcttcagtttcttcaatgtcagaatccagcccagcaattgtttccttaatagctgttgcttgagaaaccaaactttctgcatcagtttttaactgttccaagtcatcgtcttcaatggttgaagatttcatctttgcttcaatagtggcttttttaagctttacctcagccagttcatcagttgctttttgacgagcttccaaaagctcaatgagtgattttttcatcatgtctcctttaaatttttgcaagtttactcatgatttcttgcctcatgttcgcctgagcgattcgcttatcaaccgccgacatatcaaattccttaatattgtcaacagttgcttgagggttagctggcacggtcacaacagaaatttcaaagatttcaacttccttgaaaatccatccgccataaggttgcttagcgtcaataggctcataatctttaataaagaacccaatactcaggctatccaatgcccccattttcatgaggtcataagttttcttagcctctggatcactaagattaaacgttgaacgtgttcgcaagcctttttcatccacagacaattcatgcttaccaataacacagttacggtcatgattaagacacatagggacaacagccttagatttcagagtgttatcaaaacaccccttggccatcacatcgccttctctgtctgtattgtcataggttgaagcgtaagcctcaaaatgaaagtcagctgattcatcctcaaccgacttcacaacaaaggtttttagtttttccattgcttacctcctttcgtgaaagatatgccaaccacccaccctttagattctactcagattcttctgcaccgatacgaacagcattcaggttggtttcaaatacttcaccgccctcatagccaggtaaaccaagataggtttcacggaactcatttgagttcatcaatccagcatatttggacttgaagccaccttcaaccaaatccttaaatgaaatcatgtcagccatatcaaagaagaccagtaacttattgccctgagtccgtgctgtcttcgtgaagtattttctgttaatctcctcagaatagacacgctgatataacttcatgacgctagaatagtaggctctatattgttcctcagtatagtcacaggtaaataatttctcattgataccatgagcattataaagctgtgatttcaagaactctaattcttccttagaagcagtagaatagtctttgctaagttcctggaattcttcgccttgctcaagataagcaatgccaccgttcttggccaagtcaagcatactatcaacacggtccctggcttgttgcttcaaatgttcatcagctgccttagttggtagctttaagaaacctctcaagctagaattgccatcgctaagcttttctgtcaaagcattcaagttaatgtcaataagctcagtaatctgattgagttgagccgtgacattcaacttaggattttcaaatacccacacatcagtaagaggaagctcaacagcaacatcatcaagcataagctccacgctctctgctgtccaagtcactgtcttcttagcaagccatatttcaaccagtcggccattcttccaacgtggtacaacaaccgccacaccgtcacgcagcatagccctagttacatttgaccaaaagacaacaggcacttctagtggatttggtgaaactgttagcacctcagccaaatcactatgctcataccaaaccatcgaatcgacaccgcctgggttacgagtaatcttgacatgcttaaaccttaactgagctgtgtcagttgaaatcttattgtagatgttatccaaatagatggagttcctacgccagtaggagatacttctttgaagataggttcttgtagatttccgattgtttggacggaaaatcctagcaaaaacctccttcaaatttttcaaatagttgttcattcttcacctcaatcaaagtagtagctcaagtcttccttgaaattttcataacagataaaggcatctagctgactagcaaagacatcaatcttttcttttgccttttccttgtttggaaaaatattgttattggcatcaattttgacacggacgttggcatgattccatgtcgccacaggatcatcaaagatgattttgcccatcttagccttctccttgtaaaccttgagcggatttgataacgatttgaccgtctggggaatatcgtgacaaatatccccgtagtagtcgttaaacaagcgaataagttcccttgcattgtagcggtcataaccgactgccacaggcaaaattctgttgtcactcataaactgccgtaactcttcaaatatataggcttggtcattgtagtccaattcatgcacatgcagcatgccacttaattcccactcagtgtacttatcacgcagttcctttggcaatgtctcaatggtatgccgtggcatgaatttcttgtttagatagtgccgttcttccccacgcacaaccataaaagagatagagcagatgtcattgacatctgacaagtcaatcccaatcacacaacgggcgttccgttcatcatctccgacaaacaaactctcatcaaacttatctgaccaacctttacactcttcattgctgaagtaagcaagatagttgttgacaggaagattgaaagtcttagccatcagctcagcttgttgtgctggatcattcttgctcatctcaatatcacgagcgatggtttctttctctgtcgtgataccaagtaatggcatagctttctgccacatatcagggtcatgaatctctgacacatcgtccaactgataaatccaaggcatgacagaatcattgataatcttgtcatcaaggatatctacccagatgttgtaatacttatcaaagagcttgtcacgcttcgttccatttgtggaaatgtaccaggttatccaattcttacgcttacggctggaaccatcattcacaaccttgatgaagtcatcatcataagtgtgcacctcatcaaagatattgtagtgagcattagtaccgtcaaggctttcatagtcagaagtcttgatagacataagactgttagttgtttcatacaagataccttgcttggttgaccgtaggatgtcagcctcacgcatatagtgcagcaagctttcttcattcgacaacatcgcccttgaggcattgaacaaatagccagcctgttcacgactgtaagcaagaagctgaatatcagcaccccactcaccgtcaatgatttgaccaacctcagcaatagcagaaccaagagtagtcttacctgtgccacgaggcacaataataggcacctcatgaatgagacgcctttcttcataatctgtgtattcttccaaggtatcaggattggtcttagtaacctcaaccgtgtgataaaagccccacgttgtttctaaccaaaccttttgtggtaatgctaagcgtaacttaccagcaaggcctttagtattgctgcactcttcctcaatgaactcaatccgtttgtcagcttcctcctgtttgaagaggtattgctctttgtatcgctcaacacgtctaattgatttcattgtgagcttacaaatacgaatcttaccagtatagatgagctgagcatacttatcaaaatatctcatctcaaccataacgtgctaacttctcctgaatcatttctttgagcctgtcaccctgtggactttgcttttcaatcgttgacatgatctgcatgttaagcttttgatacttttccattccatcaagtaggtacttatcaggtagctcaccgtcattgatgaccttattgatttcaagctggaagttttcaatcactttttgattgtgattgtattgagttttgagatttttcaacccaactgaatcattatcactgatttcaagcattttttcttttggaatcagcttgaaagtcttacgagatagctcaacacgttcctgccttgtgtacttttgccgttgattggcaagcttttccaactctttgaactgacttttggtgatatttgacctagtttcttcaaatatgcccagcttttttcgataccttgtaagggtagcacgacttattcctagcttttctaaaacttcattgattttcaaaatcatgctcctttcttgtatcaattttcgtcaattttgggggagaggtacacaagaggattgacaccgttattattttggcgctgtcaaaattcaaaatggggggagtccacaaaaattcaaaaataaaaaaatcaaaaataaatttatattccgattatctaaatttaaatttattttactttgaaaagtttttgtgttgtgacattcaagacaaagtaactgacagttctcttcgttgagagtgatagattcatcttgataattagtttcgtcaatctctatgatgtggtcaacaatactcttaccgtgaatcaaacgtccgcacatgtcacaacgcatacgcttagcttttctgattttatttctcagagttctccaaggtttcgagttgtagaatttaatctgccaagctctgaaccagtcagagtgtttagggtttctatagcccactacattgaccccaatgcaaaactatctcttgcaacctctcttgaaatgtctctaaactttaaatctgcttcactcactattcttttgtcatagttgattaacggatttagaatattatttacaaaacttggctttattacgattttatttacagtctcgttaggcttaatatctaaagtcacctcatatccatttgcaatatgttctaagtcgttcttcgtgagatagatttctaaagtgctaccagcttcaagcctaattccatcaaatgcattttcatctttcatggcatcgtcacccccaacaaaaaaaagaacatgcctaagcttgctctctggatttttctcatgttacaaatatatcagattgtttttgtcaataatacccatttttttgacaagattatttttctatggctgaaattatgtaaaataaccatgctgaactatctatatcttatattttatccaattttgtttcacactagaaaactaattaggacaaggctttaagctcacttcaaaatatagactagaaacttcctcgttatggatagttgaaaaaatcaaaaaaatattagaggctaaaattactcatcttagtatcaagctcatcttgccttacacaaatgtagattagtgtaactgctgggcttgaatgattgaatagtgacatcaagtcagcaacgttcttgtacttcttgtagtaatgatagccaaaggtttttcgcattgtatgagttccaacattgtcaatgccgaggtcttcagcagctcttttaagaaaccagtaaaccgtcttataactgagcgccttgttctttccgacacgactctgaaatagatactcatgaagttccttgtctttgacaaattccctcaattcgtttttgagtggccttgtcatcttaatacttttatacttaccagtcttttgttccctaactttgatgtgccagccttggacatctttgacctttagcttgagaatatctccaacacggaaacctgtattgatgcccaaaagaaatagcatgtaatacttttcattccaagatgatagatagtccttcatggcttgtatatcgtctttgtctcgtagcggttcaacaatattcatcgctttgctcctttctcaaaaaaataaagcaccaaggatttctcggtgcttagcgacactatcaatctatcagattgtttctgtcaattctatatgtttttttgacaagttacatgaacaataattttgcaagtgtatcaaggatgacttcacgtcttctataaatctgcttgctatgtctgtaaagataacctgtctcgccattttccatgatgtgccaaacttgaatccaatcatatccagtatgttctccccacctcagatggaaaattttcttatcatcgggttcaagtacctctagtaattctgatatcgcattttggaactcttccagtttcagaatcattgggtcactggcataagcaacagctagattttcagaagtattagttgaagttccactgcgactagctcctgaatcatcgattcctggcattgtcaggtttttgactgcatagattctttccagttcatgacggcgctgcccaataagtttatcaatttttagatacttagcctcaagctcaaactcaaggaaatcacgtcttgtcttacttgctgttttctttgtcaaattgttctcctttggaatgctcttcttgattctttccacttgatgattctgccattattatcattgttccaatatggcggtaatctacagccttccttttccacatagataatcttttcaacaacggtttcaagtggttgtggttgctggccttcatcaatccaaccaagcaaccaggctgggttgatattgtaagccttagcgatattttcaacctgaccaatagatggtgtaccgcctttttcataatgtagcagcgtgttcatagaaatgccagtggcttcatgcacatctctgcgactgaggccaagtttgtttcttagttcttcaagccttaacttcatcttcccctccatcttctgtgtggtcttcgattttctgattttgcacgagcaatagcagagcgacacatgtcatcccagacatagtcagcattttccaactgcaaatcaaggcatctaaccttcagacggtcattctcaacttctagccgttcaatgtctttgtatgctctgttatataattcatcttcaagaaatctaatacgctcagccattgcctcttgaatgacgatgtaggtgggtttcttatattcgttcataagcacctcctaaaacggtagatcatcatctgaaatatccataggctgactatttccaaatgatggtggcaattggtcatccatgcttgcctggttcgttgaattatcacgcttttcaagaatctggaagctgtcagcaacaacctcagtcacatagatacgctgaccttgctgattttcgtagcttcttgtctggattcgtccagtaataccaatcagcattccttttttcgtccaattggccaagttttcagcttgttgtcgccacatcacacagttgatgaaatcagcttcacgatcaccagcagcattcttgaaatttcgattgactgctaggttaaaagtagcgtttgcgatgtttgacggcgtgtaacgtagctcaacatctcttgtcaagcggccaataagtacaacattattgatcatcaacctcaccaacctttctgaaaatgtacttgtcagagaactcttttctgtatctctttttggtaaccctcatagcctcatttttattagtcgttggcacgtttgggttagcactatgaagatagacaggcataacctttccaccaacaaaagcatcaaattctttaaattcaaggattcctattgattttttcatttctctttctccatttcttcaatcaaccagtcaaggttctttcttgcttttttgaggtcttcaaggccgtttttctttcggtaccgtagttggtactttagggcatttcctagataaaatcctttgagcatttcaggggtcataaagttcctgagaacatcaattgactctaaaccgtatttcccttgataatggctaggatagtttacattgtcatgcaagattctgaatccagttatcttacctagctcactttctatctttgtgtagccttgttcaatgagtttcttcatttcctcatcttcatcatttagaatattgagccgttttgtcataaaatcacattttgtcattagtttccacgtcctttcaaatagtcaggaatgtcatcaccaacagtaatttcattgtattgttcctcagtaaccaagaacttgccataagcgccagctgtaactgtgtgacggccttcaatgatttctttatcagtgattttgccaaacatttcagcgccagcattgtcagccacatagataatcaccctgtcagcttcctgatggcctttctggtagccaatatcataaaacagatagttgaatccaaaaacaaatacagtgatgatgatggcactagcaaaagccttgagattgttgaagaattcttcccaattcaggtttttcattacaaatcctcctctttaacccaaattccattgattaacttgccttttctgtccttgatttcttcataggcaatagccaagcaatcatcagccgttgtcagattgtggattgcaatggaatgaatattagagtgaagcaagctaagttctggacggataagcggtgtttttgtttcgttgtggaagatatgcttgtagagtttctgagccatctcccccaaacttgaagcaagtagcaacagctccatatcttgtggacttgcttcaatctgagcaccgttcttgatttgttgttcaatgccaatcaggacaacttgcatgtccccaagtgaatcacggatgatttcactcttaccctttgcaataccagagtaaagctccccagtttcctcaatcagcttctgaaactgcttgacaggatttgcctcgtgtaagttacggtcaataaaccactgttcaaccttctcttcaagtgtcattgttttagtcattttgataaacctttcttaatattgtttttagattttcgttgattctatcagcctctttttcatcgataagaaaattgtctgcactttcattgatttctgagatggcaaactgtatagcatcacgatagccctgcttatagtcaatattattgctcattttgtttttcctccgtttttttttaattaaagtaatcaagtagtagcaagttttagaaccataatcaattctgatttccttgctccgtattttcattgttgcaactacccttggtctatgtatgccagagttctcaatgatatggtcaataattgcttgggcagccaactccttagattcaaactggccaattggaacagctttgtaaccatatagcatgaatgtagcttcataggtcatagcaatctccttgcaattgcagcaatgacgtttactgttacgctattaccagcttgtttatataattgactgttgctattgacctgactcgccttgtcaaaagcccagtcagggaagccttgtagcctccaacactcacgaggtgtaagctttctgattctaaatccgttagagataccaaaagtacccgtagtagtattaccgttatgaccgctagctgttaaagtgccaacaatatctttctttcttctgttgtacaagtcataaacaaccacaccttgttcttctccagtcaagagagtattggcaatacctttaccaactcgtccacgtcttgtctcagaatttgggtgagataagtttactgaatcgccagcctctgcctctgaatagccttttttagtggcttcttttatctttaaaagattgttttcttgccaactgttgcatgtgacagttggagaaatttcatattctcctccctgattatagcctctgcctcgctgaattatttttggctctaaccctccaccttgcatagttctgatagtcggtgctaggccatctggatcgtagactctatttggcatttcaaatttcccaggtaatctgcctacaacatttacagcgattttaactccttctcccttatttgttgttagagttggagataaaccttccgaatcatacacttccccattcattccattaccagatggattaacatttcctatttttctggtgtggataggataattttctgtgatgcttgattcgaaaggaaaaattggtctggtaccttctcctctaagatgtccgataataaacactcgttccctattctgggggactccaaaattcttgctgttaaagatttgccattccacgttgtaccccaattcatccaaggttctgatgatggtctcgaatgtagcccccccttcgtggttgaggagtcctttaacgttctcaaggaatagatacttaggtctgagaatagatgcgaacctagcaatttcaaagaacaaagttcctcgtgtatcttcaaaacctcgtctatttccagcaattgagaaagcctggcacggaaatccgccacagataacgtccacacttccgattcctcgaataaactcatctgaaactcttgtgatgtcatgtagttcaatttctccttcagtatcatgtattactttgtagctagctctagcaaatttatttatttcacagaatcctatgcactcatgcccagcttgctccattccaaggcgaaaaccaccaatgccagcaaagaggtctaaaaatttcatcaatacctcctatcttccatatccttcggataagcaaagctatttccagtcacaccctcaagaatccgactagacaaagcaccgttgccataattgtcagcatacaaggccttaatctccttactactcaggttagtgttgatgattgtgttgctccgattgtccaaaatctcatagagaatctgatgtgtccactcattgttctggctgtcgcctttgcgactctccttgcccaaatcgtccagaaagaggtagtccaccctagttagcagctcaatcatgtcagcctgtctgtacccattgtcaaccttgaagctttcttttattttggtaaaaaggctcaccagtgagataaaaagaactgattttggtgattcgtaggctttgaattgttcgttcatgaacttggccaagccgtaagtcagatgacttttgccaacaccagaagggccagtaataatggcattgcctgttctatcctgtcggtagaactgttccatacgcttggcataattgatagcatgctggtcaatttcatccttgatttcatagttctcaagactcttagccctcagcttatctgataccaagctatctctttcaaagacagcatatgtatcagcaagcttgctgttgattttgctctgactgttcaacttattttcaaagatgttgatagcggccttggtacactctggacactgcttgagttcttcaagccgtcccttaatcggtactttagtcagccagagctggcaaccgtgaacctcgcaggtttcttccaagacttgcctagtttcaaaattcttaaaaggattcatctaaaagcccaaccttccgtcaattgtttccgtcttgattcgtggtgcttgattcaaatagccttcaaacttagaaccaaagagcgtttcaggtctgagatacttttcatacttagtgcctgaccaatccttgaccgtggtatcaatcacatgtttgaaatcatctaacctgaatccttctgaccatctagccttgataagagttttgtttttctgaatgttaggtctgtaatttctattagctttttcattcaagtaagaaataatttccttgtatggaatatcttcttcctcattgtctgaaactgtaggataggtagttaagctatccttatctaagctacccttacttaacctaacctgtgtctccattttggatacattttgtatacaatttccaataggtttaagactagctgtttttgacttgtcatactctagctgagccttttctgactggtataaggttgattgaaagcggtcagactggatatagttgtgaatccgccaatgacggataacgactacaccactatcaaagggaatcaagaacccttttgcaatcagtaatttcatatcatcatcactagcgccaatagttctctgaatcgtctttgccttatctataaagccctcatcatcagctcccatgttcaaatggaaatagagagcttgggatgatagtggcatttccaaaaaacggtcagtctcagtgatttttctactaaacattctgcgttgtgccatcatcaacctcctttgttagatactcataagctctcttataagcgtctaagtaaagttcaaagacatcattgacgtatcggccagcccttgatagaaattcatagacctcatattcttccatatcttcgctaaaacgttcaaaagcctctggaagaatataagtaaatcctttatcttcgtcaaaattgtcaaataattgatcaagtaggaattcatcatcaaaatctaaatcatcataatcagcaccatcaaagaattcattgagaatttctcttttagccttgtcagtatcatagtaatgaactggcctacttgaacatagtaacttttcaagaaaataccccagatgaccagtatagtgattgtagaatgtgtcccattcacccatattgtagaaatttcgtgcaactaattccccaaagtctcctgtgatagcaagggatgaattttttctatcgaaaatgtaacgtaagttatactcatagcccttttctggattgtaatagtcaacaatggtgactgtatcagattcgttttttacagcaatatggttgctgaaatagtggtcaaattttttcatttcattcctcctcaacgctagaaaacttggtatattccttgtggaaatacagcttgactgtgccaaggtttccgtgtctgttctttctgatgatcagctcagtgatgtcgttttctggctgaccttcttttttgtcttggtaataagcatcacgatagaggaaggcgacaatatcagcgtcttgctcaatgctgcctgattcccttaagtcggacatgataggccttttgtcgtttctttgctcaaccccacggctaagctgtgatagtgcaatgactggcacttttaattccttggcaataatctttaactgcctagaaatctcagatacctcttgctgtcggttgtcagaccgtgacccttgaatgagttgaagatagtcaatgactatcaatccaagtccgtcagtctcttgagatagcctcctagctcttgctctgatgtcagtaatcttgactccagctgtgtcatctataaagattggagcttcagcaagctgaccctgtgcatagataagacgttgccactcattaaccgtcaaatttcctgttctaatatgatggttgatgattgttccttcagctgacaacatccgctcaacaaggctttcagcccccatttcaagcgagaagacggccacagccttattggacttagttgccacattctgagctatgttaagagctagggctgtcttccccatcgctggccgtgccgctaagacaattagctggtcttcatgcaagcctgttatcagcttgtcaaagtcataaaatcctgtttcaataccagtgatttgactggtattgtttgagcgttcctcaatctttgaatgattttccaaaaggacatcatggataggtctgaaactactcttgttactggcttgactaacttcgataagtgatcgctcagcttttgcgataatctcatcaatatccatgtcctcatcataggcattgccaattgagtcagacaagttgtcaatgatagaccgtagctgtgcttttttagcaacaatcttggcataatgctcagcgtgtgagctggttggcactgcattaacaatctcagcgatgtagctgataccgccaaccatgccaagttcatccgtactttccagcgttgacttgattgtgacaatatcgatggcctcgccacgatcagcaaggctcaccatggccttaaatagaatcttgtgagctggcctgtaaaagtcatttggtttcagatactcagccacctcaatcattttttcaggtttgataaaaattgaaccaagaaccgactgctcagcctggatatcgtgaggcaatacttttaattcatccatagctttcctcagtcaacaaagacttctttctttgtttcagggtcaatgtcaacacgtcttccagtcttgtagtcaatgaagcctcgttgtgggatatattgagcaatgacagtcccagctgtctgtttgttcttgagagcttttctgagcttgatatttgagataagagactcaatcagggttactgaaataagtgtgcctactgcgataatttgtaaattgttcatgatatagttccttttgttctttcttagataacagttctttgccaattcttgtgataccattcaatgacttcatcacgagggtatttctcacgagcatttggaatcctcggaaaatccttatgacagttaaagcgttcatcaaatgtcccagtatctttagtacctaagagcattaaagcgcattgagacttgttgagttctaaaggaaatctatacttttcgtctgtcacaacgtgcattactttcatcgttctgtccattagaccagcttcgaactggtcaagcatttgaatcattagatcattcattatgcgtacctccatttatatccgtgagtctgtttttggtgccccattgctgttgctgttattctttgtgacgagatacctgttttcattgatgcagattttattgagtcaaacgtgtttatgaattccccttcaagtgtaaattgttctacaggtttacaacgacctaaagatgatttcgttgttctattcccatgattagcattttccttatctgtcgcccattctaaattatctactctattattaagtttattttcatcaatatgatttatcgttcgcttattgattggatttggtataaatgcttcagctactagtctatgaactcttatcgacttccttaatccattgactgaaagtgtcactattgcatagcctgaagataagctctgttttaagatgcgtccttttgtttttcttgttctctgttttgcattgactgttctaccaatagaccgaacacgaccaagattggaaacttgataatatcctttaacaattggtatatctttccaaacttcgttcattgtgatataatcctcttgtatctttatatatgagcctgattgccgtcaggcttttttgcgttttacagttcataagcgttcatctccaaaattttcattttggtatttgtgcttggttcccatgtcatccagtaagataatgctgcttcagcaaatttctttggcaacatgtcatagcgattgatattgaaatggtctttaaaatcaacctcagcttgtctaaagaccgactgtgcgaagactttatcagcataggctggactgtccattccacctagacaagagacaacacgagcttttctcttcttcagtaaggcttgagcaaagctaggatgaattggttgctcatttttcagataatcaacatcttgagccaatgccaactggtgctctttcagtttcttctgtccagtaaatagagcgatgaaagcctcatctgatagattttcaggcacataagctccctgttgccgaatctgtggcaatacctcgctagtgacccaacgtttgaattctttgacctgtggcaatttactggataagataagtgagtaaagaccagattcattgatgataatagtttcttgcatgcgacctaaattgtctgtgatgccctgttttagggcgtcatcctcatcaacatggagtgcaatcgcatttcgtgattttgaatagcctaaaatatcagccacgtctttcccaacaaaccaaggctcgttgttaatggttacagtacggacttcctgcccgtgaaaaacaaaaatttcgttcattcttaatcctccaacctcgtccagctctcatctatgtgtaatacatcagataccttatttttgagtttgtcgctccctttgccatatttcagcaattctgagatagttgccttagcaacaccacaagaacgagctagatgtgtttgtgtcatctgttcttcattcagcttatctttcactagctgaatccattttttctgttgttgactcatatttttcctttctagtttggtataattgacttgaaatcttttatgaaaggaggtcaagccatgaatttgaatcaaattcgtatcatagaggcatgccataaatttctaattggcatcacaaatttcgaagaagagttacaagatgacgttctcgtctatcgttacaaaggtaaccttgtcagctttgaaacctatcaagaatatgaacaacggtcatttgtagactataatctaaaatatggctatcttgatgacactagaacttacctagatgacagagctgatttgatagcagctttccctagcgaagagcacttgagagccttgcaaagagttaacgatgctgaacaagctcgtgtgcaaatctttaagctactatctcaggtcaatcttgactctctctccgaaaaaaattccaacatcaaaaaagataattttggatatgatttcttcaattttgcaactaaagaagaataccctgtttatcttttttcagatgatgaatcatttgagctagttgctatcagttgatacaacttcgccttcaaaatcaaatgacttcagttcgtgagctagttcttctagctcgcgggcttttttattgaactctttactaagttcaataaatttatccatgttagtaactttaactgtcactgtcattgaaccgattcccattcatctaccctcctttttaaattattaactaaaaagttagctaatctcttgactttttttaaatctagttttagaataagagcatagagaaaagacctactaaaagtaaggtttgacctaaagaaagcagacgccaatcagttttattaggctttattttttagttgtcttgttcgctaactctttagcttacgaatattattttaaacctagttttaatttttgtcaagaattttatatctagttttaaaatatttttttcgtatgccttagaaaggatacgatatgtctgttttaattgataggatacgtgaactcagtaataaaaagggaatgtctcttaatgacttagaagatacacttggctacagtcgtaattctctgtatagcttgaatgaaaattctaagatgggtaaaccaaaggaaattgcacagtattttaatgtctcactagattacctactaggtctaacagataatccacgaattgccagcgatgagacagctatcattgacggtcaagttgtggatctgagagaagcagctgcccataccatgctgtttgatggtaagccacttgatgaagatgatatagattttattacagcagtcctgtctgcacacttcaaaaataaacaaaaggattgattgcctatgaaactagaccaactctgtaaagagtttggagtggaattgtgcctgttcgatgccagcgactggcatagttcgggattttacaatccaataaccaaggtcttaggggttgatgtgaatctgtctgagcaagaacaaaaacaagtcgccctacatgagttacagcataaaaatcactttccatatcagtatcagctttttagagagagatgtgaactcgacgcaaataggaatatgatccaccatcttttgaaggaagaattggaaatcgctgaggaccacactcaattcaattacctggtctttatggaaaagtacaaattaaagaccatagctgatgaggctatgatcaaggaagagtatttgaatttagttggataaaatacgtgctcccctgaatcacgaataaaagcagggtgggaagatagttgttatggcattatttggtggcaaagacaaagaacctgaagtagaaatttttacagctgagccaaacgagcgagtttttgagtttaagaaatcaaagacgatagtaagaatagatgactactttatcagaattgcaagaaaaagcaacatgtcaaatatgcttctacatggacttgatggcgaaaaatcaattttgttatcagcaataactgcatatcaattaaaagagccaggggcaacggttggatatttacaattggtatatcctggatcagcagatactaaaggtggtgtctttgatgctgttaaggatgagaatacagtcacttttgtcaaagaagataaacaagccatcttagaattgaagatagcaatagaaaccgcattaaaaaataaggttcagaaataaataaaaagccctacgctcaactttggacggtccgagcgtaaggcgaatcgtataagaaaagttgccaatctggcaagtcttttcttgtactcattttatcagaaatgaggtaaaaaaacaaatggcatcatatcgaaaaagagagaacgggctgtgggaataccgcatttcctacaaaaccatagatggaaaatataaacggaaagagaaaggtggttttaagaccaagaagcttgctcaggcggcagcaatcgaaattgaaaagaaattgacccaaaacatcttgacaaatgacgaagtaactctatatgactttgtcaagacctggtcagaagtctataagcgtccgtatgtaaaagataagacttgggaaacctattcaaaaaactttaagcacatcaagaactatttccaagagttgaaggtcaaagatattacaccgctttactaccaaaaaaagttgaatgagtttggcgagaaatatgcccaagaaactcttgagaaatttcactatcaaataaaaggggctatgaaagttgctgtaagggaacaggttgttacctttaattttgcagaaggtgcaaaagtgaaatctcaggtagagcccaaaaatgaagaggaagattttttagaggagcgcgaatataaggctctcttggcccttacaagagagaacatccaatatgtatcctatttcactctttaccttcttgcagtcacaggactgcgtttttctgaggctatggggctaacctggagcgatatagacttcaaaaatggcattttggatataaacaagagttttgattactcgaatactcaagattttgcagatctgaagaatgagtcatcaaaaagaaaagttccaattgattcaaatacaatagatattcttcgagaatataagaaaaatcattggcaagctaatatcaagaatagagtgtgctttggtgtatctaattcagcttgcaataaactgattaagaaaattgtgggtaggaaagtcagaaatcactcattacggcacacatacgcttcgtttttgattttgaacggggttgacattgtgacaatttctaagctccttggacatgaaagtccagatattactctgaaagtttatacacatcagatggaagcactggctgagagaaattttgagaaaatcaaaaatatttttttagtcgcataatttggggcgaatttggggcgaaacaaccaaaaaccttgataaaccaaggttttcaaatccgtctaccgccttaaatataaaagattttatccaaagataacaaaaaatcaacgattgttcgttgatttttttgttatcagaattatttttttaaatccaataattgataaggtatagaagattgactatctcttaatgaatagctttctaattcattgacattatcccttaaaatttgagactctttagaactaattaaaccgtccctttcaaattcagagattgttctgcgttccaagtaatatcctcttagggtttcatttaaaatatctggcgttatgcgtgcaatgacacgttctacaaataaacctgatttaattaattctgcgtctcgaatgcgttcattttgtaagaaatctatcaaagttgcattataataaccttccatatcttctagcgtttctaaaatgaggtcattatttgataagtacaaatctgttaagtgctgacgattgacttctgctaacaaccgtttcctgtttttgaaatgttttttccgatttcgtattccttgtccaaatgttaaaaactcatgaacaataccacgaataacacgcataagaatcgttaaactataagtgatatttgacacaaagctacgattaacttggcgttctaagtattttaaataacgttggtaaatacgatattctttgatagaaatattgccataacgataagcagcttcaagtccatcgctttctatactaagcatcatcagttgcaattcagctaagtccttcttaatgtcactagattcttgttctaaaatgagatgacgaatacggctattataattatctataactgcataaaatgaagcttgattttcagaactcttaccatcttcttctaagacagataatacttttgttaaaatcgatagacgtattaaataatcatctttcacctgtaagggaggcgctaactttggtaatactaaaagtcccgttaaaaaactcattagcgttactgcaccaacagtgaaaagaatcaaactataccccaactctcctatgactgagtgcttgggtaataagagtattgttgctatggaaacacttcctttaactcctgaaaaagtcaacagttgaatctctctccaatactttttaaatgatttatggtatttgaaagatctccaagcataaaagcaagaaactgctagaaagcgaactagaaaaagtgtgcaagtaactaaaacaacaatactaataagatcaaaattactataagcgttacttgttaaaagaggaccaatgatacgtgtcagttctcttccaaatattaagaaaactaaaccatttaaaataaaatttaaggtttcccaaataacagaggtaacgcgatctacttgagcatcaaagagagtcacttttttcaaacgatttgcttgcattactcctgccactaccaccgcaataatagctgaaaatcccaacaaatcagcaacgaaataagcaacaaaaggtaaggttaattccaaaagtagagcccctgtaacatcagcagcatcaaatttctctaggacagtgagacataacctcattagaaaagcaaaaagcaagccaattaaaaaaccacccattatggccaatgctaacttgagactagcttttgctaaggagaaataacctgttacaagggctgttaaagcaaactggaaggaaactagaccactagcgtcatttaaaagaccttccaatttgaggatattttctgcccgtttaggaaattgaaacctcttagcaatcgatataaaggcaacggcatctgttgggcctaaggctgctccaagcgcaaagcatgccgcaagtggtaaactaactggcaaaaggtgccctgctacataaccaacgacaatagctgttaaaaataccgttggtaagattaagtaaagaataatagcccgatactttataaaactaccaatatcactttcttgaccttccctaaagttcaaaggagcaataacaaaggcaaggaataactcaggatcgatatggacttgtgacttatgaaaaactaagccagagagaatcccaaagaccaactggataaatggtaatggtaatttaggaaatatcctattgataacattagataaaatcaaaaacaggagaaagctgactattagaatagtttcttccatattattcctccttcataacatctatcaattctttcttcaatttctcaattttatcatcgatttttttagtatcttctctctccaatcgacagcgacatctttctttttcaagtattattaatttcttctttttcttctttactttacttaagtgaacatttgaaaattcttgatttttagaagaaaggtatttatcttttagtcgattcaattgttcttccaaagataattgagacatcatgacctcctatttaatgaccaaattattaataataagtattttttctttcatcggctatctctagtataacacgcatttcttaaattgatagattttaagaatatcgttgctcattatctccatatgtggtagactaacaacaatttaaataggaggttaaccaatgaaaaaattaacaaaaggcagccacattcgtgttcttagtccctcttcttccattgagcgtctgggtggttttgaggctaacctattagccaaagaagtactagaaaagctgggatttcaagtgtcattctctaagcactatctagaaaatgatatcctctattctgcttcgattactagccgtgtagaagatttacatgaagcatttgccgacccttctgttgatgccatattagcaaccattggcggattcaattccaacgagcttttaccatatttagattatgatttaatctctaagaatcccaaaataatttgtggttactcagattcaacggccttccttaatgctatttttgccaaagcaaaaatccaaacttacatgggccctgcttattcttctttcaaaatgaaggaaggtcaaccttaccaaacacaagcttggcttactgccatgacagaaaaccactatgaactttggcctagtgaagaatggtctagtgatccctggtatgatcccagcaaaccacgccaatttttcccaacagaatggaaaatttataatcacggaaaagcttccggtacgattatcggaggtaatctctctacgtttggcctacttcgaggtactccttatgcaccgaaaattgaacgctatgtcctcttgattgaagaggctgaggaaagtaatttttatgaatttgaccgcaaccttgctgcaattttacaagcttatcctcatccacaagctattcttatggggcgctttcctaaagaatgcggcatgactccacaagtctttgaatatatcctttcaaaacatgctattttcaaggaaattcctgttatttatgatatggattttgcgcacacccaacctcttttgacagtgactattggagctgagctaagcgttgacactactacattatctctatctataaaagaataaaaaaatactcctgctactcatctgagtaacgggagtttatcatttagagttaccaaataataacacgtttttcaactggacgccacatgttatcaccatctttaacatcaaactctttatggaattcttcaaaattcgttactgtaatattagttcgccattgtgctggggcgtgaacatctacactagctaacatttgcatatactcatcacgtgccttcatacgccaaattgtcgcaaagttaataaagaaatccctcgctgaaaaatctgactcacgctgcgcagcttctaaagcacaagcaactccacctaaatctgcaacattttctgatactgttagtttaccattgacttttgcgccataagattccagtccatcaaactgctcaactactttatctgtaagttttttgaaagcttcaaaatcttcatcagtccaccaattattcaaacttccatgttcatcaaatgaagctccattagtgtcaaaagcgtgtgatatttcatgtgcaatcactgcaccaattcccccataatttgctgatgaactttgctctaaagcataaaatggttcttgtaaaatggctgctgggaagacaatttggttttgttgtggatcataatacgcattgaccatgtgggcaggcatatgccattcacttctatcaactggtttattccatttactccaaccataggctattgaaattttgtctaaattagtagcattttcgacaagcgatagtttaggatcaatgatttttttagtataagtctctggtagtttctcagggtatccaatatgtggtgtgataacattaagtttcataatagctttttctcgcgttgactgtgcaagccaatccgccttttctaagcgtgacttatagacatcaatcatcgttgcaatcttatgctcaacatcagctttagcttctggagagaatttttctcctgcataccacaaacctagagcttgattgtaaggtcctgaagcaaggtagtaagctgcttttttcttatccattgcttgtggtgtgcctgataaagctcgactgtaaactcccgatttgatacgaatatcatcagttaagtaagcattataggcattcgcagctgataaaataagatctgcctttaataattcccaattagattctgagtaatagtcagatgcaaattctgtccagaaacgttcttcaggaacaataactttatctggtttttgtcctaatatcttttggaaaatagcatctaatggaagttcaggtgctaattttgtgaaatcttcccagttataaggatggtaaagtttaacatattccgaactctcttcgcgagataagacatattgtgccaattttgcatccaatgctaaaaccttatccaagatatctttaatttcctgttctgaaaggccaaacaaaggcagtaggtcttcttgacttttacgccaaaaagcaaggagttcctttcctttttcattatcttcactataataagttgtatctggtaaaataatcccaggcgcttcagcccaaagtacattcaattgagcattcataaagtcaggagccacaccaaatggaaattcatttggtttaccctctagttcatattctgcaacttttgatgcaaactcagagaaagattgtaggcctttatattcttcaattaatggtaatactggtgatactcctacctcttcacgtttttgataatcagctgtcattttatgaaaagcaataaaatgatttaaaatcgtatcacttggtttattttcatcagccagccacttatctgtcgttgacagcattaatgcttcaatgtcatcagcaagatcagaaaaaccacctgtccttggtttgtcatcaggaataacagctgtcttagcccactccccattaaccgcttggtaaaaatcatcttgatattttatcattattttctccttaatatctcatatgtaatctcttacagtctaacagaaaattcagagtttgactattaaaaatactctcatattggtgctttctctaaatatcattttgttatttttgctatactataaaccaacaaggaggttgttatgattgaaaaatattataattgggcaacgcttggaaccggcgttattgccaacgaattagcccaagcactagaagcacgtggacaaaaattatattctgtagctaatagaacttacgacaaaggacttgaatttgctaccaaatatggtatccaaaaagtttatgatcacatagatcaagtatttgaagaccctgaagtggatatcatttatatctctactccccacaatactcacatctcatttttacgaaaggctttagcaaatggtaagcacgttctttgcgaaaaatctattactttaaacagcactgaacttaaagaagccatagatttagccgaaactaaccatgttgtcttagctgaagccatgactatttttcatatgccaatttatcgccaattaaaaacattagttgatagtggaaaattaggaccgttaaaaatgattcaaatgaatttcggaagttataaagaatatgatatgactaaccgttttttcagtcgtgacctagcaggcggtgctttgctggacattggtgtttatgcactttcttgtattcgctggtttatgtcagaagcacctcacaacattacctctcaagttacatttgcaccaacaggagttgatgaacaagttggtatcctactaaccaatcctgcaaatgagatggcgactgtcagccttagtttacatgcaaaacaacctaaacgagcaactatcgcttacgataaaggctacattgaactttttgaatatccgcgaggacaaaaggcagttattacttatactgaggatgggcatcaagatattctcgaagctggcaaaactgaaaatgccctccaatatgaggtagctgatatggaagaagccgtttcaggaaaaactaaccacatgtacttaaactataccaaagacgttatggatatcatgacacagctacgtcaagaatggggatttacctacccagaagaagaaaaatgaagagagcttgacaatgattgtcaagccctttttagttaatatacactacattttcttaaaaaataggcgtttaaagaaataaatcataccaactgctaaacttaaaatagcataaacatagaaaactgcatttatttgtcctagtaaatgatcaaaacaagacagaagaatagccgcactagctccaccaatattacaaaatactaaaactaatgtcgttgcagaaccaaccaacgaatattcaacacggtctgctactaggctaaacacagcagtgaccatcaggctgtaaaggaaacctgatgccatcgcactaattgttagtaccattagattagaaggcaatccaactccaagcaatgttaaagaaaataagacgaggcagattggaattaattgtttatgaaacatagctatcaactgaccaaaactcatacctgctattattcccataagcatcatcgcactaagaacaagactagcttgagctggcgtacccaaaccaaattctactactagcagaggtatcctaagattaatcccagtatttatagttatgacaaatcctgctaaaatagctaaggcgacaatataagttaaatcagctttagggattttttgacctttagttttaatcttgtcatttgtatctttcaccactttcttaggcgcaaaaacaagatatagaactaagattggtaaagctaaaaaataaatcataaatgatttggaccaaccaaaagtcaacaacagcccaactaaagctgtcaaaccagcatttcctaaaacttcaaaggacccccttaatcctaagagttttcttctttctttgccttgataatattcactaatcacactaatggccctagtattaataaaaccaataccactccccaataaaagacgcgatacaaatactaaaaggtagttctgactgacaaccggcaatcctccccctaatgctgttagcaatagcccaaagataatcatatgtttctcagaaagttttttacttaaccaaggtgtgataagcaagatgaagataatagccatcgaaggaattgaaaacaataattcaacttggggtgatggtaagcccttatctctataataagatatcatttgtggtagggctggtgatgtcgaaaaagttgatagcaagataagtgataaagagagtaaacttagcttctccataaagattttcaagtgacaatacctctttctgatgtctttttttagataaataaagtataatcaatattaaactagaaatatatgacatatgtcctaaaactatctcaaatagggagtcaatacatggatatagaaaactactgccaagactactgtttggagactatctttccaaaacattatttcaaggatttacaagtaatcaccctaactgccggccaatccgtctgtaaacagggagaacaattagaatacttgcactacatcgtcaagggacgttttaaaattgtacgtcgactctttaacggcaaagaacatattttagatattaaaacaaaaccaacactgattggtgatattgaacttttgactaatagacaaattgtatcatctgttattgccttagaggatcttacagtcattcaattatcacttaaaggacggaaagagaaactgttaacagacgcaactttcctcctaaaacttagtcaagagctagctcaggcttttcatgatcaaaacatcaaagcgtctactaatctagggtataccgtcaaagagttacttgcaagtcatattttagcaattgaagaacaaggttactttcaacttgagttaagtagtttagctgattcgtttggcgtcagttatcgtcatttattaagagttatccacgatatggtcaaagaaggccttatccaaaaagaaaaaccaaaatactttatcaaaaatcgtttcgcactagaatcattaaatattcagccatgaagcgtagctttatcatttaattattttatgctaaactaaatcagagaatacagttaggagaaaatatgtctgctattgataaattagtaaaagctagtcatttaattgacatgaatgacattatccgtgaaggcaatccaacccttcgcaaagtggctgaagaagtcacattcccactttctgagaaagaagaaattctcggagaaaaaatgatgcaatttttaaaacactctcaagatccaattatggctgagaagctaggcttacgtggtggtgttggtttagccgcaccacaattagacatctcaaaacgcatcattgccgtccttgttccaaacgttgaggatgctcaaggaaatccacctaaagaagcttatagcctccaagaagtaatgtacaaccctaaagttgtatcgcattctgttcaagatgctgctttatctgacggggagggatgcctatcagtagatcgtgaagtacctggctatgtcgtccgccacgcgcgtgtaactattgaatatttcgacaaaactggtgaaaaacatcgactcaaattaaaaggttacaactctattgttgttcaacatgaaattgaccacattgatggtattatgttttacgaccgtatcaatgagaaaaatcctttcgctgtcaaagaaggcttacttattttagaataaggacaaataacctagagataattttctctaggttttattttttaatagcaaataaaataagaaatcttttttaaaaagtcgactctttccaaaacatctggcaatctacaatctgttggttatcgacggagtcatctccttcaatacgattaatcaaaatctgtgctacttgttcaccttcttcataagccggctggacaattgttgacactttaggagatgaaaagtctgtccattcaatattgtcaaacccaactaaaccaactcgtggcatatcaaaattgagattcttcatggcagtaaaaaccattggtaaagcccaacaatttggtgcaaatactaatgtctcctccttatctggaactaccgcttttagaaagtcttctatatcactttttgaatgatcatcatcttcaatcaccaaagtgtcataaccgaaaccattgtcctttaaagcatccatgaatcccgaagctctctcaatacgtgtactaagcaagctcgtatcagcagtaatcataataaactttttataccctcgatttagacactcctgtgtcatatcataaacagcatcatagttattagccttaacccaactcgtcttatgttcataaagttgactatcaaaaaataccattggtttctttttttcttttaaaatacgagaatactttcgaaaatttgatgtaggctgaataatgaaaccatcaacacctaaatttaacatattttcaatataatcttcttcacttttggcatcgtaattactattacccacaataatttgatagcctttttgtttggtgatgtgctcaattccttttacaatttgatttgaaaatgtgtttgttatatctccaattaagacacctagtagttttgtttttttagaatttagacttcttgctatcgtacttggtctataacctgtttcatcaatcacctcttgaatacgttgcctcgtctcatccgacattttttcaaatttttgattcaagaaaaaagaaaccgttgttttggaagtttttgataattgagcgatgtcattaatggtcatttttttagacataacaaacctcctttctaattttactaattttatttttttatggttaatatagtactagtatagcataataatagccctcttaattttttaaacgactcattttgccattatttttatcatatacaatgacttttcctttgcattttatcccttgcatcaaatagagtttatccccaaagataatatcatccataagcactccaattaaataatgaaagtcttgagacctaatatcaaatgcaatgctattacttagttccttatgactgttcgtttgcactaaaggaacatatttcacctgacagttccgatcaactatcaaggtataatccatcacctcatcaacaaattttattttcttaactaatttatgactttctgtcaattgattataccgcttagaaataaggcaatcttctagattaaaggtcgtaggacttactaatttcaagtcattaacaaacccattttcataaatgacctgatcatctaaaatatattgatttgttaagacatgctctcctggacaactcaccttatcaataactaaggtaatggcctgcggtaaagttaacaaccatcgcttatggtaatagatatcagaagctctttggacatgtagttgtccttcgactaaatggtacctatcctttgaagtcaactgacaatagtcacattttggataagaattgtatgtccaagagtccttgatcatttctaagggttgcccatcaagggtacatgttgaatgactagtcgaacgtttaaaatcataccttagttgttcttctttgtaagtatatcttcctgcatcaatgaaaataggtttctttttatcatagagacaaacactattattatcactatgagtatgagcgctaccaaatggaccgttcttaaaaaatatataacgcctatcatcacgtaaacacacatgaccagaatctggaaaaagataagcagactctcctattgtcgcacgcggtatttcttcaaaaagataaattgatggcttcccaaacaaaagtaaagtttctaaattaacattatcaaaagaaaatgattttgttttagaagatttcaacacaagtgttgccaaagttagaatatcacgagtatcggtcacatcactgtcccctatagctagttgacaataatccggaccagtcatagcaattagataggtaaccattttttcaatagtttcttctaatggtagataatatttaggcgcaaggataactagttccattaaggacttcaagacttctacatgatacataattgattgttcatactggctcccgtcatctaaaatttgaagcttgatttgaagtaataattcttcttcagcaaaactctgaatttcaggtagatttaattcatcttcataatagtataaacacgccaatattgctgttgtttgtaaaattccccagttacttagactatctttttcacgataatagtccctcatataagttatctgctcccgtaaactagttaatagtttaatttttttagtttctgttattaatccaaaataatctaaaaaaatcaaaactttgagccatgacatgcaacgtatcccagtgtcaatagtacgacttaccgccccttctggctttagtgtaaattgacaatcaatccaatggtacataaaatatttcatttgtctaaggtaagacttatcgccttcaacaatgtagaccaccaggaatttaaaaagataagtttgacgatttagcatatacaaccattctggatcatctgttactggcttatcccactccaaaggatcaagacaatatgctttagaacaaggttccatatcccaattatcattaaatacaaaagtgttcctcatcatcaaattaacagaggctttcatttcttgataggcattagattggtatgttttaatatacttttgacaaaattccctatcaaaatccttgaatttattatataagcgatctttcatttttttacaaaacgtcctcgtccgatataaaaaggactatgtcattgatatgtcataatccttatttatcaaaattttattaagctaaaatacctaaccagctaccaaggataccaataataactgtaaggataactaacttataagttgtccattttttatttttaataaggtaaaacataaggaaagtgtagagtgctggaagtagagctggtgcaattttatcaagcataccttggacagtaacaatcttttgcgttgtactagttactttttctggagcaaaagtgtaagggattgtaagcttaacttgtgttgcagctaaacttgagatgaccgttacaccaacgatattagctgcccgtgagataactgacatttgttcactcaatttatcaataaaactggtcccaagacgataaccatacatgccagtaactaatttaattcccgttaaaatagtattcatagccacaaagaacagaatcggtcccatcaccaaaccatctgtcgctaaagaggctgcaatcgttgagaacaagggtgctaagcaaaattgtgataaagaatcaccgatacctgcaagaggccccataagcgccatcttaataccgcgaatttcttcttctggccgctcattatcaagcattgctaaatgtaagctagttacaaaaggtaagaaatgagggtttgtattgtaaaactccacattttcttctagagctcccgctaaagcttttttgtcatctccataatattttttgagagctggatatatgacattagcataaccaagaccttgatagttactgtaattaaagccattttgtaaataaaaggcacgtaaagctgttttagtgtaatcactttttgctaattttttagatccagtcatcttggttgtctccttctgtcttagtttctttagtaggtgcagctggttttctgaaaatatcaagcaaagcaaatattgttgcaattatagctaccccgatagttggaaccccaagcacactgttagtagccactgatgttaaaactccgtctccatttgctgttggagttagaactggcaaaccaaaataaacagctagaacatatccaagtaggatataaggaatgagttcttttttagccattacagagagaatcatcgcaaaaccaattgcaggaagcattttcccagctaaggttagaccattaagcaaaacagggggaatgagagcaaataaatctgtcaaagtttgcgttgaaagagcacccagtactcctaaaccaaatcccaatccagcgaatgcccaaattgtaccatttgctgcaattttaaatcctcggaaattacctgcttgcaaagcttttttagctgtttcaggcgcccctgcaaaagcagtataagttgctgtttgaagaaattgaataccaactgcaattggggttgataatgcaagagcagcttccggtgtgatttttcctttagttccagctgttgtaatagccatcaaagttccaaaaatcccaggaccgattgggtttggaggaactgtccctcccgctcccacaccaaatcccatgtaagccagttcagatattgctccaactgccaaagctgtttgaatatctcctaaaataacaccaacgcctagagagagaacgatacaacgatttgtatagaggccaagcaacatgccactaaaacagaaagccgtccacagtccaattaagacagcctgaagaatactaatatccatatttttctcctttatatgatagtaagtttgtccaactaaatataatctaaaatattaacttccacagcaccatcgttacctgttggagttgttttagtattaaatgcaatgtgatattcttggtttaattttctaattatctctttatccttcatccctaagaagatagagcgacttacctgctctttaccttctccattatgaatatttccaatattaatctctttaattgggacgccccctgctacaagtctatagacatctttcaaatctttaacaattataaaaatcgtctgtgctgggttggccttgtgaataatatcaataactttttgaatatcaaaaaatcgcaatgctattgattctggcaccaccgtcttcattaacgtttgttgaagatgatctttggagacatcatcatttgccacaataacagtattacaacttaaaaatttcacccaaagttgtccttgtccatgaataagacgctcatcaacacgtgtcattacaatatttggtcctgctgccatttctgacctcctcgttttctattatttattgtttattttgttagtaaaatactcttaccaataaagttcccagtctttatagaatcttattaaggcttctaagtaataataatctccccaaatattaccttcatctactcctttacctgaatgccacgaatacacaccgtgcaatagaagaggacgtcctgctataagttcattattactatactgttcaatcagactacgaagcattgtatgcatagcatatttgtatgtctctttatcaggatctacttctggtaaatatttaagcatctcatgaattccacacacagccgttgctgttgcggatgtatctctaggctggcccgagccatccgtaaaaataaggtcccaataggataccttgtcttcaggtaaacgatttagaaaatagtttgtcatacctttaaaaaggataatctgctgataatctttcattttccggtaactaagcggaataccgtagatgccccatgcttgccctcttgcccaagatgactcatcactataaccctgtcgtgtgacaccttttaacggttctccagtttctgggtcgaaataaaaagtatgaaaagcagaagaatcatcacgcaccacattgttagctgaagcgtagaagtgattcaccgcaacttgtctatacttttcatcacctgtctgttcataagcaaaaaataagagttggatattaagtaagcaatcgataattaagcgatagtgttccttatacccgagttctccccaagcctgaataaatccacctttttcttgatagcgctccatcaatttatctgcagcttttatagtggcttctaaagctttaacatcaccattgatacgatattctgctgtacaagatggtgtgtaaagaaatcctaagtcgtggtgatctaatgctatacgattattaatacgatttagaaatgacaatacatttttgtgggctatgttttttaactttttatcctgattatactcataagctaaccacaagcaccctgtccaaaaaccatttgtccattctgtgttatccataactttataaatattattgaatgttgcaggcgttggatactcttcaccaaagtaatcaatattaatataaagttgcttcaaggctttttcaatcgcttcctcaacttcaatcttagttaataatctactgtttaaaaaacgctttggattttcaattgactcaaccttgaccggttttattttcatcattattaaatgcctccctcaaaagttgcttctgcagtttgtgtagcaaggcaagtagaaaaatcaacaattccttcatgagatgatgttataactttatcaacaagatcatctacatgttcaaacatcgttctagataaaacagcttccattaacattgaaaggttcaagcccgataaaacttttatctttttatctgtatattctactgataaggcggaagaaacattgaaaggagtcccacctagcaaatcagtcaatactaaaatttctttgaaatcgataacctctctttgcaaagcaactctaacatcattagaagacatgcctgcaataaagttaataccaacaacatattcctgatgcccagcaataagttctaaagagcttaaaataccatctggaaagttgccgtgtgctacaataataatttttatcatattttctcctcttgagtttaccggtttacttttataatcagattatagcgctttcatttttaggtgtcaacatcttttttatattttttgagcagtttacttgattttttataatgatgtcttttttatctttaagaattataacctagataaatctttgttatatatgttgccaagttttatagaagaagaactctatagttgacaaaaccggtttactttgttactattcatgtaaacaggtttacttcctgaatttttttacggaggtcatattatgactgaacaattcttaaaagacaacttttcactagaaggtaaagtcgccttaataacaggcgcttcttacggcattggtttttcaatagcaactgcttttgctagagctggagcaactattgtcttcaatgatattaagcaagaactcgttgacaaaggcatctccgcctataaaaaacttggcattaaggcccatggctatgtttgtgatgttacagatgaagatggaatcaacgaaatggtggacaaaatttctcaagatgttggggtaattgatattctagttaacaacgcaggtattataaaacgcacccctatgctagagatgagcgctgcagattttcgacaagttattgatattgatttgaatgctccctttatcgtatcaaaagcggtattacctggaatgatccaaaaaggacatggtaaaatcatcaatatttgctccatgatgagtgagcttggacgcgaaacagttgctgcctatgctgctgccaaagggggacttaaaatgttaaccaagaacatcgcttctgaatacggttctgctaacatccaatgtaacggtatcgggcccggctatattgccacaccacaaacagctccccttcgtgaacgtcaagatgatggttcacgtcatccattcgaccaatttatcatcgctaaaacacctgccgctcgctggggtgaggcagaagatttaggtgcaccagctatcttccttgctagtgatgcatcaaactttatcaatggtcacatactctatgtagatggcggtattttagcttacatcggtaaacaacctcaataataaaggagtaatataaatgaaaattgcattaatcaacgaaaatagccaagcaagtaaaaatactattatctacaaagaattgaaagcggtttctgatgaaaaaggatttgaagttttcaactacggaatgtatggcaaagaagaagaaagccagctaacttatgtacaaaatggtttactgactgctattttacttaatagcggtgctgcagattttgttattacaggctgtgggacaggaattggagcgatgcttgcttgtaatagttttcctggcgtagtctgtggattcgctgctgatcctgtcgacgcttacttattctctcaagtaaacggaggaaatgctctttcccttccttttgctaaaggatttggttggggagctgaattgaatctgaggtatttatttgaacgtcttttcgaagatgaaaaaggagggggataccctaaagagagggctgtacctgagcaacgcaatgcacgtatccttagcgaaataaaacagattacttacagagatttactctctgttttaaaagaaattgatcaagatttcttaaaggaaactatttctggggagcatttccaagaatatttcttcgctaattgccaaaatcaaaatatagcagactacttgaaatctgtcttagactaaagcgtctgttttagaaaggacttttatgtctaagattctttttttcggtgaacctctcattcgcatcactccaaaagaaaatgactattttgcagatagtatctcaactaaactattctatggtggctctgaagttaataccgcaagagctctacaaggctttgggcaagatactaaactcctctcagccttacccaataatcccataggtaatagttttcttcaatttttaaaagcacagggtattgatactcattctattcagtgggttggagaacgtgttgggttatattttttagaagattcctttgcttgcagaaaaggtgaggtggtctacgaccgcgatcatagtagtttacatgactttaggataaatcaaattgatttcgatcaattatttgaaggagtttctctctttcattttagtggtattacactatcattggatgagtctatccaagagataacactgcttcttttaaaagaagctaaaaaaagagagataacaatctccttagatctcaattttcgcagtaaactaatttctcctaaaaatgccaaaatccttttttctcagttcgctacctttgcggatatttgttttggtattgaacctcttatggttgactcacaggacactaccttcttcaatcgcgatgaagctacaatagaggacgtcaaagaacgaatgatttcgcttataaatcactttgactttcaagtcattttccatactaaacgtctacaggatgaatggggacgaaaccactaccaagcttacatagcaaatcgtaaacaagagtttgtcacttcaaaagaaatcaccacagctgtaaaccagagaattggaagcggagatgcttttgtggcgggagcgctatatcaactacttcagcactcagacagcaagacagtcattgatttcgctgtcgctagtgcatctttaaaatgtgctttggaaggggacaatatgtttgagaccgttaccgcagttaacaaagtactaaatcaatcgaaagacattattcgttagaagggagaattatgataaaatcaaagattttgttgcaattaatgcaaggaaaaatagttgctgtcattcgtggaaatagccaagaagaagcttttcaagctgctcaagcatgcataaaaggtggtatttctgctatcgaaatcgcctatactaatagcaaagctagccaagtcattgaacaactagtcacacaatatactaaccaagaacaagttgtcgttggggcaggaactgttctagactcagaaactgcccgaatggctattttagcaggagcaaagtttattgtatctcccgcatttaatctacagactgctaaactatgtaatcgttatgctattccttatttaccaggttgcatgaccttatcagaggtaacaacagcacttgaagccggttgcgaaataattaaaatattcccaggaggtactctaggaacatctttcatctcatcactaaaggcacctttacctcaagtacaaattatggtgactggtggggtaaatctcacaaatgccaaagactggtttctatctggagtaacagccattggtattggtggagagttcaataaactagcagctttgggggaatttgataaaatcacagaaatggctaaacaatacaaaatacagctaaatctgaattaacacaataaaaagacaaggcacccccacacctcaatcatgagacagaagaaaagaacttttataaagccatttttctgtagtaccgtttatcttaatcagactcattatctcgattttcttatcagaccgagataatttttagctaatcttcctgtagacataaccgttctacttccgacaactgatccatgtcttcaccaaagatatactacttgcccgcagattgatataagtagtgaagctcatcattctcatatcatttcagcaaataatagatttgatatcatttttatatccaaaaacttagcaatgacctatcaggcttacccgcttttcctatctcaacacagactaacttagctcctatcaaatacattttttaaacataattaaaaacatttctgattatagtttattagatttcaacagaagtattttttctgcgtctcagcttttgagtgtaccgttattttgaagttttgatagttgagtgatatcattaatagtcgttttttagacacgctaaacctcctttctaatttgactgattttattttttataacgactcgttttactgttacatctctttataatcacctatttaaatagacgcatttaaaatcaaaattaacccaagatttttattgaaaaacattttttaatatgttattatttatttattaataaattaggagatttttaaaaaatgaagaaaaaagattaaaattaacttgtgtcttatcatttgctgtagcttcaacattattcaacctatctgatttaaatatatcatatgctaatcaaaataatattcaagaaactaatctagttgaaaaaaacagtgaagataagtttattcaagagttaaataggtataaaacagagataccaaatttcaaaggttttaatgtttggattttaggtgataaaggctattacaaaaaccttatcaatttagaagaaattaaaaatatccaagctacattaaaaaaagaaagaaatgaagaatatgtctttgtcaaattaaatgggaaaatcgcacatgatacaaccgtattcttgatgaataaaaaacataaattacttaaaaatatagaggaatttaagacgataacccaaaaaaggctaactgagagaggaaagttcccatatgataccgttcattctacgtttgaaattaaggatgaaaactttatcatggaaagattgaaatcatcagggttatctatgggtaaaccagttgattatatgggcgtaaatggtatccctatttacactaaaacattatctatagttaataagtttgcctttgaaaataattcaaaagattcttcatattcttcaaacattaatattagtgaagataaaataaaagaaaatgaccaaaaaattctagatttaatagttaaatctggagctaataatcaaaacttaacagatgaagaaaaagtaattgctttcactaaatatataggtgaaataactaattatgacaatgaagcttacagagctagaaatgtcgacacagaatattacagagcttcagatttattttctgtaacagaaagaaaacttgctatgtgcgttggctatagtgtaacagccgctagggcatttaatattatggggatacctagttatgtcgtttctggtaaaagtcctcaaggaatatctcatgcagctgtgagagcgtattataatagaagttggcatatcatagatatcacagccagtacatattggaaaaatggtaattacaaaacaacgtattccgattttattaaagaatactgtatagatggttatgacgtttatgatcccgcaaaaacaaataatagatttaaagttaagtatatggaatcaaatgaagcgtttgaaaattggatacataataatggaagcaaatctatgttatttattaatgaatctgcagctctaaaagataaaaaaccaaaagatgattttgtaccagtaacagaaaaagaaaaaaacgagctgatagataagtataaaaaattattgtcacagattcctgaaaacacacaaaatccaggagaaaaaaacataagagattatttgaaaaatgaatatgaagaaatattaaagaaagataatttatttgagcatgaacatgcagaatttaaagaaagtctaaatttaaatgaatcattctacctacaattaaagaaagaagaaatgaaaccgagtgataatctcaaaaaagaagaaaaaccaagagaaaattcagtaaaagagagggagactccagctgaaaacaatgattttgtttcagtaacagaaaaaaacaacttgattgataaatataaagaattattatcaaaaatcccagagaatacacaaaatcctggggaaaagaatatacgaaattatctagagaaagaatatgaagaactactacaaaaagataaattattcaagcatgagtacacagagtttacaaaaagtctaaatttgaatgaaacattctattcacaattaaaagaaggagaaatgaaactaagtgaaaatcccgaaaaaggagaaacgaacacgaattaacctttcaaatatctacatcaaataacagaagtctctgtatcaagcgaattgtagcttttttgaatatactaaaaacactcctacctctattttactagaagtaggagtgttttttcattttagttcatagatgcagtgtcattgctatccttgcctttttttgtacagtattatccgatgactttaaagcggtcatcatcattcatgaattctttttctcctgtttcagcttcgattgaaccaaaatttagttgtccacgaagtttccaactagctggaacaccataaacagcttgtactgatgcatcaataactggattgtaatgttgtaaattaccaccaagtccaagttctgcagaaagggctgtccaagtatttactgaggcaatacctgttgattgctcagaccaaactggaaagttatccgcataaagaacgaattgttcttgaagagatttgacaacatcttgatcttcaaagaagagtactgttccctttgaagctccaaaactagctaatttttccttagttccagcaatagctgtctctggagcaccttgtactttcattgtttctaccaaatcattagcaaccaattcatcccagaacttagtaacttcatcattcaataaaatgacaacacgggaagtttgactattaaaagcagatggggattggcgaactgcctctttaataatctctactattttctcatcagaaacttctgtattgcgaccaagagcgtaaatagagcgacggttttttaattcttccaaaaatgacatattttttctccttgttcttcaatctcagatatcttactacatttgttctagtgacatatgaattagattaaagttatttattactatgtagtaattatattaccactatatcataaagtcaaagaatgtgactcacaaggttttaaatttttttaaaaggttaatcaagtcttcttgctctgtttctgttaagactgaaaaagcatcttctacacgtttaatatgctctggtagagctttttttatcacttcttctccttcagttgttaaactcaccaaaaaggctctcttatcattcggacaagaatggcgtaatacccatccctttttttccatatttttaataacaacagtcatattacctgatgtagcaagcatattttcaatcaattctccaattttcattgtgcctttagcatagagaacatccaaaactgcaaactgagttggtgttaattcaaattctttaaatgattctgagacttttccgtctattgttctaaatgcttttcgcatgacaaccatagatttaaccgctgaatttttaaagtttcccatttcatctcccaaacgtattttttcttattttatcactaattagttatttcaagcaagaatatcatctttgccctatcaaaagcagctggcaaataataaggttgagtagttactcaaccttattacttagaagaaatcatcaaaaagactcaactgattgtcttctggtaaatttcccaaaatacccatctcatcaaatttttcaactaaggtacttgagactcctcctcgtttacgaagctctgtttttgataaaaattcaccatcttcacgtgcccgaactatctgttttgcaacgttttctcccaagccttccatagcaacaaatggagggattagcgtatcctcttcaataataaagtcagtcgcatggctacgataaagatctaatttcccaaatttaaagccacgctcaagcatttcattaaccaactctaatgtcgtaaaaagatcattttcgacattcgtcgcctcattacgctgacgcttctcagtgatatccttcatgcgcgccttaacggcatcaagtccagcactcattgtgcgtaattcaaaagctttggcgcgaatagaaaaataagcacaataataaaatattggataatgtactttaaagtacgccacacgtaatgccattaaaacataggctgctgcatgggctttagggaacatatacttgatttttccacacgattcaatataccaatccgggacattattatcacgcattgcttggatataaccattacgctcatcttctgaaattttcaaccataaccccttacgcacgcgctccatgattgtaaaggccatctttggttgtaggccagcgtgcattaaataaaccatgatgtcatcacgacaaccaataacagttgataaggtagcaataccttccttgattaagtcttgagcattacctaaccaaacatccgtaccatgtgatagccctgacagttgcaacaattctgcaaatgtggttggatgggtttcgttcaccataccacgaacaaagttcgtaccaaactctggaataccaagcattcctgtaggagttccaatttgctcttctgtcactcctaaaacttccgtaccagaaaataacttcataacgtctggatcatctggaaggatatttgatggatcaattcctgataaatcctgaagtttacgaatcatagtaggatcatcatgtcctagaatatctaacttcaagacattctcatcaatatcatggaaattgaagtgagttgtctgccaagcagctgtcatatcatctgctggatattgaaccggagtaaaatcataaacatccatatagttaggaataacaacaataccaccggggtgttgacctgtagaacgtttaactcccgcagcaccagtcgctaaccgttcgacctctgcatcgttataaaatttattgtaatctcgttcgtaacctttgacaaaaccaaaggcagttttttcagctacggtacctaccgttcctgcacgaaaagcatattcttctccaaagatatcacgaacgtctaagtgagcagaaggttgatcatctccagagaaattcagatcaatatcaggaaccttatctccatcaaatcctaagaaagtttcaaacggaatatcctgtccatctttcttgtacaaagtaccacatttaggacaatttttatttggtaaatcatagcctgaaccacaagaaccatctgtgataaattcagaatgctgacaatttgggcaaacataatgaggtggcattggattaacttcagtaattcctatcatggtcgctacaaaactcgacccaacagacccacgtgatcctactagataaccacgttcattagaacgttgcaccaacatttgcgaagcaagatagataacggcaaatccattaccaagtatagatgctaactctttttcgatacgtaaatcaataatatcaggaagaggattaccatatatttcgaatgctttagcataagttaattcagcaactcgttcttcagcacgatcaacaaacggagtatagagatccccttttacaacttcaacgtcttcaaatcgatctgcaaaagtattcgtattggttacaacgatctcataggctaaatctttaccaagaaaggcaaattcatctaacatctcatttgttgtgcggaaatgtgcttttggcaaaggcgctggctgagcatcctccccacgacctatagtcctattaatcatggcaccttgtccaagactacgaacaataatctcacggtaaatctcatcttcaggctcaatataatgaacatttcccgtagctaaaacaggcttatctaaacgccgaccgacctctattaggtctctaataatttgttgaatccccacctcatctttaattaaatcacgtactaccaaggggcgataaatagcaggtggcatgacttcaataaaatcataatatttagctagggtcactgctgcatcaattccatttgataacaaggcatcaaaaacttctccatcagaacaggcagtacctagcaagagaccttctctgtgagcatctaaaactgacctaggaattcttgccaccccttcaaaatatttaacatttgaaaggctaactaacttaaatatatttttaagtccaacctgattttggacataaatggttgcatgctttatgcgtgcctttttgtaagagtcttcagctaccaatttagtattgagctccatcaaattagtcacatcacgattttcccgcgcctcttttaagaaaataaagagtaagcgacccgttgcttcagcatcgtagttggccatatgatgatgttccaaagcaacttggaaacgtttggttagaggccccaaaccatgacgcttatattcaggataaagatttcttgcaaattctaaggtatcaatgaccggctgtgtgatcaaaggcagattatgacgttcataattcgcattcataaaaccaacgtcaaaggttgcattatgcgcaactaaaaccgtaccttgacaaaaattctgaaattcctgaaggacttgtaaaataggttttgaacctctgacatgattatccgtaatacctgtcaattcagttgtaaaggcagaaagaggatgacctgggtcaataaactcatcaaattgctcaataatattacccttgaacatttttgatgctgcaatctgaattaggtcattattagctgcagaaagacctgtagtttccacatcaaatacaacataagttgcttcgtgcaaattcatatcaacttcgttgtaggaaataggcactttatcttcaacaatatttgcctctaatccaaaaattgcttttatacctgctttttttgctctgtggtagccatgcggaaaactttgaacattggcatggtcagtaattgcaatagctgggtgtccccacttagctgcagtatcaatgaggctctcgacagttggtaaagcatccatcgttgacatattggtatgagcatgaaattccacacgtttttgatctgctggcattaagtctttacgttcatgatgcacaatctctttgatatcttgaacattcattgtcaaagatttagtaaagttattgttctcaatattccctctgactcgcaaccacgaacctttagaaatcatatcgtacttcttcaattcttcatcatctttagcccacttttgcatagcaaaacttgaggtataatcagtcatcttaaaattaatgatatgacgtccagtgcgggttgtttttcgttcaacactaaaaaccattccttcaaaaacgatacgattttcttctgttgtcacctcaatcatgggtgtaatctctgctttttcaaagccagcttgacgttgtttgatacgctctttgaaatcataattttgagttggggtcacttcttctgatggaggcgctgaatcttctagtgatttttgtgcttccaaggcttgcatagcttcttggttagctttttcaagcaattgctcgcgattagtttcaaatgatgattttaagtcttgcgtcatttgttcatcagaaaccatatcaatagcaagtttaccaaatccaaacaatgaaaactgttgttccaaacgcggcaaatgattctgacgaaaatgattattattgacaaattgaggtgctgaaataatcatctgactgccattgtaatgaacttttaattgtgaaaaagaactcttaaaacttgcactattacacaagggttcacaaaaagcttgttgataataatcctgtagcagatcatcagaaaaatcaatagtttctgctcttatatcaaaagtagcctttatatctgctttttcaaaactattcactaaacgagtttgtaattcacgatacacctcaattggcaataattctggaaatgaaaaatgaaattcccataagcgtgatagagaatgaacctttacctcgataatatcagcagacgaaaaaacacttgaattcttaatttcaagcggcatttcaatctgatccataagtttcttgaacaattctgacatagttttctcctgaatatcttacttccattttatcacatatctgtaaatatttcgagataacaaaaggaggctgttaaaaaaggaatttattagccttcttaacaacactctcttaactgaaactatttatcataagcatctagactgtaggtttcaataatttggtttaatttactagcataagcagtatctgtcgcataaagacctgttagagctgcagtagcatccttataagaagaggtatttgatttccaaacagatgcatacttttgactagatactaactcagcataatcatatagtgaagcagaataatttggataggcgcgaaaaggagcttggatttgagtcatattgcctttcccatcatcttctaaagtaggcatttggacagatttacctttatattctcctttgatgccaaagaggttataattaggagccttagacaaatctgattgtccactggatgattccaaaatagcttgtgctaataagactgacgcatacaaatcataggtcttagaaatttcaatagctgttggagaaatcgtttgaataaaagtcgtcgtttgatccgatgcactagtgactgtcggttcgacattatcatttttataattataaaaccaaaccccacccaaaccaaaaaccaatagtgttgttgttaacctcaataccaatttatctttttttcgacttttcatgatggctcctttctaaaatatcatttcattataacaaaaggcagttgctttttaccaataagaaccatactaaatttcactccatataaaaaagttagcacatcagactaacttttttatcggcttatttttttgttagaatctctaaagtttcaattaagttatcagcgtgaacctcaatcgtatcaccacttgctttaattttcacttcaacgataccttcagaagctttcttcccaacagttactcgaattggaagtccaattaagtcactgtctgagaatttagaaccaacacgttcattacgatcgtctgtcaggacttcataacctttaagcatcaaatcagcttcaattttctcagtaaggtcttgtgactcttgatctttgacattgacagtaatcaaatgtacatcaaatggggctaattcttctgggaaattaatcccccaagcaaagcgataagctccttttggtgtcttattcacaaaaagtcgggcatgttgttcaatgacagctgagagaatacgactaacaccaataccataacaccccataacaataggatttgagcggccattttcatcaaggatgttcgctcccatactatctgaataacgggtacctagtttaaagatatgtccaatttcaataccacgagcaaatttcagagtacctttaccgtctggagaaatctccccttcttttacttcacgaatatcaacgtattcagctgtgaaatcacgttctggattaactccagtaaaatgataaccatcttggttagcaccagacacagcattagcaaggtcttgaactttacgatcagcaataattttaacagagtcaggtaggttaactggcccaagagaaccaaaacctgcaccaaaaatctcttttgcttgctcttcacttgcaggctctaagaaatcagccgctaaataattttttaacttcacatcattgacttgatcgttaccaactagtaaagcaaccacgggctgttcatcagcaataaacaatagtgtcttgatagtttgattttcatcaattgataaaaatccagctacctcatcaattgatttgcagttaggagtttctacttttgttacttcttcaaaggtagcagccttagtagatggtttgtactcattcgttgccatctcaaggttagcagcatagcttgattcagtagagtatgcaatagtgtcctcaccagaaactagccaagccgagagttctaccttaatttcttctaaaacatcctctggaatatcatcaatagaaggaatagttttatcaaggactaaccaacgatttaaatctgtacgattgggagttactgccataaattcttggctatctttacctcccatagcacctccgtcacctataatgcctttaaagtcaagtccagcacgtgtgaagatggcttcatatgctttacggtaatcttcgtaagtgacatcaaggtcttcataatctttgtggaagctgtatccatctttcatgataaattcacgtgttcgaagaagtccattacgaggacgcttctcatcacgatatttagactgaatttgataaaggtttagtggtaattgcttataagattttactgcatcacgaacaagagttgtgaaagtctcttcatgagttggtcctaagataaaatccgattgatcacgattctttaatttataaaggtcttcaccatatgtttcgtagcgcccagattcacgccataaatctgctgtaagaagagctggagctaacatttcaactgcaccaatcttctcaaattcttgacgcataattgttttaaatttttcaatagtacggttagctagaggcaaataagcatagattccagccgaaacttggcggacatatcctgcacgaaccataagagcatggctgataacctgagcatcacttggcatttcgcgaagtgttggaataagcattttactttgtttcattacaataagatacgactaatcaaagttgattctttttcaattgagaattgcaattgaaaaattcgtatttcctttcacgttttattatcttttagaagaaagctcgcatgatatcgttccaggtcacagcaatcattaatactaacataactgctaccccagcgagcgtaatataagtttctgtttcttgtttaagtggtttgcgacgaatggcttctaaaatattcatcactatcttacccccgtcaagggctggtatagggatgagattcataatacctaagttgatagagattaatcccattaagttgagaactgtgacgaaaccatttttagcagcttggctactagcctgatagagagctactggacctcccaatttattaatactaaaatgagcaataagtttctttaattcatttaaaattctaaagaaactttcccatgctagttttaatccacctaaaagtttgtctttaaagcttgtctttaaagctggcataatgccgatgatgtaggatttatcaactttctgtggcttaacgttgatcgttttcaccacctctttgctcttaatcttaagggcaagtttttgttttttttctaaatgcctagttgacttttctactgctgctgtcaactgttcccagttagaaactttgtgcgaccctatttgtaaaatacgatcattattttttaaacctgcactagcggcaggaccattttctgatacacggacctgattggttgataagtcttgaacacctccttgaataaaagcaagtgcaataaagactacaagacctaaaataaaattattcatcggacctgcaaaattggtaattaagcgcccccatacagaagcattctgatactgcatatctaagggagcaatacgaatttcagtaccatcctcctcaatgatagtagcatcgtgatcaacactataggtttttgtctcacttaagaccaatcctgtgatagttagtttatcttctaaatcataagctgttacattgattggtaaagaagtattgtctaattgttttcctgataaattaatacgagttacaatgccttctttatttaaagtaaggctagccggcgtccctgtcttaatttcagtcttatcatcaccccaaccagccatacggacataaccacctagcggtaatatacgaatagtataggttgttccttctttatcaatgtgagaaaagatttttggacccataccaatagcaaattcacgaacaagaattcctgatttctttgcaaaatagaaatgcccaaattcgtgaacaactacaatgacaccaaaaataataataaaggttaaaattcctagcattcaattcctctctaaatacaatatattattttagaataagccaaagaagtgcatgattgggaaaacaaaaatcatactatcaaagcgatccaaaatccccccatgacccggaatcaatttacccgaatctttaacaccaaaatgacgtttaatactactttcaactaaatctccaaattgaccaaaaatgctaaagatagccactaaaactaacatgactaggaagctatgaggcgcatagacggtcttatcaaaaagcataaaaaagaaagctaccacaatggctgaagcaatccctcctagactcccttcaattgttttatttggagacactgagggtagtagtttgcgttgtccaaattgacgaccaatcatataagcaccgatatcagtcgcccagacaataaataaagctaacaacaccttatctattccagccatacgagcactgactagattttgaaagccaatacccacataaaaactagacgcaattggaaaggcagcatcttcaaaactgtaagaattactgttcaaaacagtacctgccaaaatcataaaaataacaataccgtatgctgataaactagcgtcaactggtaaaaaggacaaataactatctaaaggaactgttaaaacaaaggctcctatcatagctaatgcaccttcaaaggaaaatatttctaaacgacgcatacgaagtaattcagaaacaccaatcatagctaaaagtccaactaaaaattggaaaggcaaaccacccattactaaaaaagggataaatatggcaagcgcgacagctccccaaataacacgttctttcattttctctcttctttctatacactaccaaatcgacgatggcgttgattataatccacaatggccttatgtagttcgtcttttttaaaatctggccataaaacgggagtaaagtaaaattcactataagctgattgccaaggtaaaaagttactcaagcgtaactctccactagttcggataatcaaatcagggtctctataaagatagggtaagctatttgtcattaaatgatttgctactaaatcctctgtaatatcgtcaggattcaacttagcttccaaaacatcctgagcaatttccttaatggcattagtgatttctgaacgtccgccataatttagcgcaaaattcaagacgagccccgaattatgttttgtcctcaaacaagcgcgttgcattgcatcgtatgttgccttaggtaatttatgagtatctccgatgacctgtacacgtacattatttttatctaactctggtacatatttatcaaaaaatttaaccggaaggttcataataaacttaacttcatcatctggacgtgaccaattttctgtagaaaaggcatagacagttagtactttaacacctaatcctgaagctgctattgtaacttcttgaagagcatccatccccgccttatgtcccataacgcgtggttttaaacgtttttttgcccaacgtccgttaccatccatgataataccaatatgtgctggtattttctccaaaggcatttctacttgtttttttcttttaaatataaacataatgttccttaatttagcaatcgtttttcttatcagcccttttaaaagagctggaaatatcccatactataacattttaccacatttcaacttatttttgagtattaaaatgccatttgtgacagcaaactaaaaagaccagaacaatcatctggtcctacatatcttattcagtttcgatggctgtttctttattttcgtcttcattgacttcaataatcttaacatcttcaactggttctgttggtgttgctgccttagagacaacagatttgatagctgccaactcaaacgtcaaatagacaccatcaacatctaaaaccattcgttgtgcttcagtattaacttcatcaactactccaaaaagaccaccaattgtgacaatttcatcacctttttgaacagcattcaattgtttttgacgttcttgtgcttgtttcttttgctgacgttgcatgaagaacatcataccaaccataacaacaagcataataataggtaagctcatttgattctcctttccgtgttctacgtaatcattactatagcagatttatgctatatctgcaaggagatactgtctcttagccaataaattcacggatttcttcttttgtcatttttgaatcgcacttcaccttgatagttccgtttttaacaaccatcaaacctggcactgtaggaatgtcatatttatttcgaaattctttatttgcagtccaatgatcaaaatcttcactatctaaatggaataattcaaattcatcttcatcagctacttctacaattttaggaacaaagaggtgacaaaatggacaagaaatacgaccaatgaacagtacaaaatcttgatttgaatcaattttatcttcaatttcggcagccgttatcaaagtcatggttgccaaaagttcttcaaaagaatacatagttaaccaactttctaaatcttatatttaaagaataacctatgatggcaaaacttgcaaggcaagagtaacaacgatcctatcaaaatcattaactcacttctcgcttcaaactatcctcaaaaatgctcactcatatttaaatgactcatcaaaaaaactgagcatagctcagtttttattttacaccttatttttgtacagcattactgacgcttttagcaactacatcggccacatcattttgaaaagcatttggaatgatgtgagttgtgcttaattcttcctccggtattaaactagctatgcctctcgctgccgcaatttgcatttcaacagttatcgtttttgctctagcatctaatgctcctctgaaaatacccggaaatgctaaaacattattaatttgatttggaaaatcactacgaccagttccaactatgtaagctccggcttttaaggcttgatctggataaatttctggaataggattcgccattgcaaatacaataggtttatcagccatcttggaaatccattctgcatgtaatgcttccggagcagaaacacctataaaaacatcggcattctccaaagcatcttctaaggatccagattggaattctctattagtcaattttgcaatcgctttgtgatgaggggctaatgactcccgatctttatcgttaataatgccaaatcgatcaactaccgttacatgttttgctcctgctgatagaagcttccttgttatagataagcccgctgaacctccaccattaacaactactctgatgtcttcaatgtcttttttaactagcttcaaactgttaaacaaagccgctaatactacgattgctgtaccatgttggtcatcatggaaaactggtatatcacattcttcaattaggcgttgttcaatttcgaaacaacgtggtgctgaaatatcctctaaattaatccctccaaaagtcggcgaaatagcttttactatagaaataatttcctctgtatcatttgttttcaacacaattggcacagcatctacatttgcaaaacgtttaaagagtgctgctttaccttccatgactggcattgctgcctcaggaccaatatctcctaatccaagaacagctgaaccatcactcactacggctactgtattttttttagtcgtcaactcatatgcaagctccacatcctctgcaatagctgatgatactgacgccacccctggggtataggcaatactaagatccctcttatcttccaccttaacttttgaaattacttctaattttccaccattttctctagcttggttgatagctaattgacctaaattttcactcattttgataactccttttgataaatattagaataacatgcgtaaaatggctgtcattgtgataacagtaatagctcctcctaaacgcgtagcaacttgagcaaatggcatcaagttcattcggtctgctgtacttaaaatggcaacatctcctgttcctcccataccactttgacaagctgaaataatacctgcttcaacaggattcatattaaggaatcgcgatacaaagaatccaacagaaataactgtaaatacaacactaataacaactatgaaatattgtatgctaagcgttgccacaacatcttttaacgggatataaagcaatcctagacctgccattagaggaaatgtaaaattaccagaaataaatttataaagttgcttagctccattttgtgtttctctaggaataacattaatatatttcaaaatagctgctgcaacaatcattaatacgggaccaggaaatccagttaattgctgcaacaaatgtccaaaaataaagagactacatgctgttaaaacacctccacccattttcttaacgtcaattgggccagaatgatcagcaataatatctgacatgtcctctcctttatttaaccttactaattgcccttgaccagacaagtgtggtttcttttctcccaaacgattcaatagtgcagtacataaaatggcaaagaaattaccaataatagtggctgggatgagttgagcaactagttgttcactagctacaccggtaattgaactatagcctaacgataatggtaaaataccttcaccaataccaccagctaaaacgggtgttacgatataaaacaaagtgtgtcgccactctaagcctaaaataacaccgacaaatgtccctaccatcatcgcacaaaccattcctaataacatggggaaaatcattcttagcaatccctgaatcaacattttccgattcatccctaaaatactaccggacactaaacaagcaatataaaaataaagaaagttagcttgcttcatcaacatatttgttgattctaaaacatttttattaatgaggttgaaaaacaccaaaatagatggtactaataaagataaaatagctgggccaccgaagtttttaaaaccaggaatgctagctccgatagtccctaagaaccaccccattgttaagataactgcaaatcctcctagcatattgactggcaatttttgtaaaaagcctgctagaagaatcaataatgctaaacaaacatatactggtaggggaactgaccctatcttaatatgaaatagtttagcctttaagtcttgcttttgacctctagaatcctcattattcactaccttcacgtctgccatgaaagcacctccttttacttcttatgtacagtttactttgggacttagtgataaggaagtttatttaagtaattgaattatttcaacttatttaattaatttaagctggattctagtttttaggctatgttatactaaactcggagggtgctgatgaaaaaaaaactatctctttgggcatttctatcattgattttagtcactatgaccatttgtatattttctattttttattatgtcactatacatcagtcctatcgtatggtaagggtacaggaagaaaaaatcttaaaaaatactggttatgctttatcgagaaatccacaagttatacaaacactcaaagataatcactatgatcaaagtctccaaaaacaaatgttattccttagcaaaaaatcaaatttagactatattgtccttataaatttaaaagggatccgttttacccaccctgactccactaagattggtaaaccatttcaagggggtgatgaacaagctgtttttaagggaaaagctattatgtctactgcagaaggttctttaggaaaatctttacgatacttaattccagtatatgatcaccaaaaacaggttggggcaattgcagttggcttaaaattaacgacacttggagacttatctcaaagtagcataaaagagtttagtaagcctctcttgattagtattttgattagcttagtcgtcacaagtataatttcttatggcttaaaaaaacaacttcacaacctccatccaagtgatatttttcaacatttagaagagcgcaatgcaacactggaccaaattcaagccgctgtatttgttattgaccagaggcatatcatcaaaagaaataatcctgcagctagtttattattcaaaaaagaggggcaacgagacctattttcaggtaaattattagaatctttaattcctcaactcaagcaggatcatttttcaaaaaaaactgaacaagtattacattttcaaggacaagactatttactatctatctcgccaattacggttaaaacacaaaatagaggctatgttgtcttcttaaggaatgttactgaaacacttttcactttggatcaattagcacacactacagcttatgcttctgcgctacaggcccaaacacatcaatttatgaatcaacttcatgttatttatggacttgcagacattgaatactacgacgagttgaaaatttatttaaaagaattattggagccacaaaatgaatttttagcacgcttatcaatgttagttagagagcctcgactggctagtttcattattggcgaaagagaaaaattcgcagaaaaacacatcaatctatccacagaaattttagtagaaatccctaccaagtcaactgttgaggatgttaataactatctcttgctccacagatatattaatacgaagatactcacgctattaaattcaacgactttagtttctttacgtttaaattatcaaaataacctcattgaaacagattatcaatgggagaatgagaagtggttactcaatgactaccatcagtatttcaacgacgcttattttcaacagttacttgtagattcaagagctacttataagatctctttaaaacaaaataaggttattataagaacaaatattatctactcagaagggccttagtatggacgtattaattatcgaagatgatcctatggtggaatttatccaccgcaattaccttgaaaaactcaattattttcaaaacatctattcaactgctagtcaaacacaagctattgcttatcttaatgacattaaaatccaacttgttcttttagatattcatattaaagaaggcaatggtctagaattattaaagttattacgcaatcaacaccaaaataccgaagtcattgttatttcagcagccaacgaggcgcacactgtcaaagaagcatttcatttaggtattgtagattacctgataaaaccatttacatttgaacgctttgagtctagtattgaaaaattcctaaatcattatcatacatttgaagctgataaaatctatcaagacaacatcgatcactttcaaaaaatagattctggatggctagagggagaggttaaacttgatgagaaagggctctctgaaattacctatcagcatattcttgatgccattcaagagttagagcagcctttcactatccaagagttagcaaaatgcagtcaattttctcatgtctctgttaggaaatatattgcctatatggaagaaaaaggccttctgacaagtcagcaaatttatactaaggtcggtcgtccttacaaagtttataagcttataaaaaaaaacttaggcctgtagacctaagtttttttaatcttcgtagccatttggatgactagaatgccatgcccatgccgatgaaataattttatcaatattatcaaatttaggctcccacccaaggatttgacgagctttctctgaggaagcaataagcgtatctggatctcctggacgacgagctgccttttgagcaggaatttctttcccagtaatacgacgagctgcctctaacatctgaaggttagaaaaacctgtcgaagatccgagattaaacacgtttgattcattcccttggcgaaggtaatcaactgctaatatatgagcatctgccaaatcaaatggatgcacataatctcgaacattagttccatctggagtattgtaatcatctccaaaaatcattattttgtcacgtactccttgagcaacttgaagaatgattggtaacaaatgtgtttctggtttatgatcttccccaattgagccatccggtttatctccagcaacgttgaagtaacgtagagcgacaaacttaataccgtaggcttgatcagcccatttcataattgtttccatcataagcttactttcgccataaggattaataggattttgaggagctgtttctaaaataggaacttgttctggaataccatatgttgcagctgttgatgaaaagacaatatttttgatatcacattcattcattacttctaaaagttttatcattccagcagtgttattatcaaaatattttaaaggattttccattgactcagcaactagtgaaaatgccgcaaaatggataacagcatctacatcaggattttccctaaaaacttgacgcataaacgttttatcggataaatctccttcataaaaaatcgcatctgaatgcaccgcttgacgatgacctgttaccaagttatcaacaacaataactttctcttttccttgtgtgattaactgatcaaccatatgcgagccaatgtagccggcgccacctaaaatcagaactgccatatttttctcctatttcaatactcttttaacatcatttgttacctcattatactgagaataagctttttttgcaaatatctaccgaaattagaatagctctatgcagaaggcatcccacggcttgagagtgttacttgatagtacttcttgaacctctgtatttgaaataatagtttctttaacagcttctggaaattcaaaagattggttttgatcggataagttcgcaactattaaataacgttctttatctgtttgacgaacataagcaaataccttatctgctgtttccaaaagtttaaaatcagcatcaactaaccagtcgtgttctttacgtaaagcaactaatttttgataagtataaaaaatactttccgtatcatttaacgctgcctccacattaatttcctgataattgggattgactgctagccatggggtacctttagtaaaaccagcttgatgttcttgactccactgcattggagtacgagcattatcacgaccgactttacgaatactatctaaaattgttgcttcagataccccattatccatggcttctttagcatagttaagggattcaatatcatctacatctgctaaacactcaaatggataattagtcataccaatttcttcaccttgatagatataaggcgttccacgcatcaaatgtagtaggattgctagagccttggcagattgttttctgttatcactatcatttccccagatcgagagcactcgaggaaggtcatgattattccagaataaagaattccaaccttggccaagctccaattgtgtttgccattttgtaaaaatatctttcaatgctggaacatctaatccgtcactgtaatcccacttaggagcgtcaggtttatgttgaagacctacatgttcaaattgaaagaccatagataattcttcattatcgggatttgagtattgttttgcaatgtctggcgttgctccccaagtttcacccaccgtcaataagtcatgctttccaaaactagctctgttcatttctttaagataatcatgaagttttggtccattaccagtaatgcccttatctggaattttcccaattaaatcaatgacatccatacggaaaccaccaatacccttatcaatccagaaattcatcatatcataaattttatgacgtaaagcttcattctcccagttgagatctggctgacgtttgctaaaaaggtgcaaataatattgacctgatactttatcatattcccaagctgagccactaaaaatagaagtcaaatcgttaggttcatctcgccaaatataaaaatcacgttcaggactattagggttttctcgcgcttctacgaaccaagcatgttcatcagaggtatgattcactaccaaatccatgatgattttaatcccgcgttgatttgcctcttgtaacagttggtccatatcattcatatcaccaaaaatatctgcaatggcttgataatctgaaatatcataaccattgtcatccattggactttgataaacaggtgataaccagatagcagtaatccctaatttttcaaggtagtctagtttgctagtaatccctttaatgtcccccacaccatcaccatctgaatccataaatgaacgtgggtaaatttgataaatcgtagctttatgccaccagtgtttcttcattattcttctcctatcaataattcattcatcttttattttaacgtttttcctcttttagtgcaagcgtttgcgtaaaaacattataaaaaggctggaacccaacctttttatgaatatcgcttataccttaacgaatagcttgttcagtatctgcatcaaagaaatgccccttagcaacattaaacgttaggttaactttttctcctggattatggaagtcacgcgcttcaacacgagaagcaaattctgtttgacctaacttaacataaagcatagtttcgctaccgagtaattcagaaactaaaacttctgcttcaacattggcatttggataagtatcttggacaagaagattgcttgaaatgtcttctggacgaataccaaaaatcaattcttttcctttatagcctcgtgattctaaaagtttttcttgaccttcagggatagcgattcgaagaccatcttcactaataatcataccattttcaactttaactttgaagaagttcatagatgggctaccaatgaatcccgcaacaaatttattggcaggaagattatagagttcttgtggtgaaccaacttgctcaattttaccaattgtaccatcaccatcagggttcttagtagctgacataatgacaatacggtctgccaaagtcatcgcttctgtttggtcgtgggtaacataaatagttgttgaaccaatacgttgatgaatttttgcaatttcagcacgcattgaaacacgtaatttagcatctaagttagataaaggctcatccattaagaacactttggcatcacgcacaatagcacgtcccatagcaacacgttggcgttgtccacctgacaaatccgcaggtttgcgctctaagaattcagtaaggccaatattagctgctgcttcacgaacgcgcttatcaatttcttgttttgagaatttacgcaatttgagcccaaaagccatattatcgtaaacagtcatatgtggataaagagcatagttttggaaaaccatagcaatatcacgatctttaggtgatttgtcattgacaacttcgccatcaatcttgagctcaccttcactaatatcttcaagacctgcgatcatacgaagtgttgttgatttcccacaacctgatggtccaacaaaaacaataaattctttgtctttaatatccaagtcaaagtcttcaacagaataatgcgatgcacttggatattttttgtaaatatgatttaaatttaattctaccattagattgacctcttttattattgtgattttattatagcaaagaaagggttttcatataatggtaaccttgcctaaatttcttgtgcaaactaactaaattttaggtatccatcgaaatcaaataggcataggctaaatcatctaatatttttaaattaagtcccgaagattgggtaaatttatctaatttatattgcaatgaattccgatgaatgaaaagtgccttagccgttttagcaagatttccttgctcttgccacagggcttttattatagccgaagtatcactcgtatcaaggatatgttgtaaacattttgctttaatagaaggcatgggcgattgatttgccaaagcccataaagccatctttggaaatcgacagtaatgttgttcggccttgtgactaagaaaaagcgtaaaaagtttatattcttcttcatataattctttccagtccactgcttgtagatgcgtccaactatttccaaaatagcaccttaaacgcgtgttaaagtcattttcaatcgttggtaaaatatctgttagtaattccgtagcattaaagaaattatcctgatttaaaatcatgacactttgggtttgattaattgtcataattgtttctacgtttattactaaaggcgacaagaaatccttaagttcttctgataaggtaaattgatgctcaataaaaataaattggactgccgaatgagattggggcaaccttccacgaccttcaactagatagcggtaccaaggattctgagaatccactgaactcgcatcttccaggcttggtgtcatttgtaataagtatagttcacgcttagttagcgaagattttggaaagtggaggacatgaccatcttgctcaacgatgatataatcctcactctgtttaacttcctgtttagtaataacttctggaaacagttccttaaaatccatggcatcctccactacagttttgttcattatatcatatttataacctctttttgagcacagaaaaagaggagaatgtctcctcagaaaatttctgttataaaatagtgatccgaatagaatgctgtttcgactgctttggattaagccgtacgatattttgtttatcttctaaaatatcagactcttcaatagaagttgacaaagaactccagggttccaaagccaaaaaaggaccaccattgttacttgtccaaagaataagattctcaaaatcatcaaagtcaagttggattccttttgcatgatttctagattttaagtaaaccgtcttagatcgtagttggtctaaagtaatagcatctttttcaaataaagcatgattaagagataattgtttttgattttctaaaaaaggatgtctagcttgtaaatctaacaagcctgtatccggaaacgactcaggaattgtgcaagtttcaaactgttcaaactctagatagtaatcactaaatacttccttttcaaacaaagggcaattaaagcctgggtgagctccgatagcatatggcatatttttttctgattctaagtttttgacaatatatgtaatggcaatgcttttatttcttaaggtgtaagttatttctaaactaaaacgataaggataatttatcaacatttctttactacttttaattgtaaaacgaacagaagaatccgatatgtaatcatagtcgaatgttttgtgacgtacaaagccatgccttggtatgatacccgtaaaatgtggagcttgagctggtctgtaaatgacgcaatcatttcgaacacttccgcatataggaaataaaataggagcttgcccaccccaataagtggcgtccccttgccaaaggtactcaacgccttgactatctgtaatagaagtcattgttgcacctaacgcttttaatgtcacttgcaactcatgattttgtatcgtaatagccattatttttcctttcataaagaacaataattgctttaccagcttttctctagcaattatctttccttccaagaagttgctgttttttgcaaaattttatttagttcatcaatattttgaaaacctattgtacgtaaccattgacgtgcaccagcttctcctttttcaacatactctttaacacttccagcccaagttgctctaccacaaaggacaccgttaaatttagcaccagcttctttagcaaacacaagagtctcttgaaaaagctgagcaggaactcctgcactcaaaaaaatgtaggggagtagtgtcgcctgatcttgttctctaaaatatgccgcagctgtcgctttattataagcagtctctccttgcgcaaaaccttctacatagtccatattgacaggcacttccaccttcaagacatcaatattaaatcgaggatttgaaaaaactttcatagcttcaataaccttacgtggcttaattttggcatactcaatacctgagctatccgtaatcttttcatcatatgacaaaatttcaaggaaaaaaggaatgtcttctgcaacacattcagaaccaatccgttcaatataagcttctttttcttcgtttacttcatccgaactatcaacatcataataaagtaagaacttaactgcgtctgctccctcttctttaatgcgtttcgcagaccaaatgtctaaacagtctgggagtcgcttggtactactggtatcataacccgttttttcgtacgcaagtaaaagaccggcattgtcatctaaaactttcgtagctggcaacccatattctggatctaacaacattgatgaagcgtaaggggttaattcttcagctaccaaaactttaagtgcttctatttgagaaacagtgggctcctcagattgatattttgccattaatcgcttcaatgctccacgttggtcaaaagccaaggccgaaataataccatttttatcactcaattgttccatatgtttttgtttttgttctgttaatcccatcctatacctctttcacttggatttgactgattaattcttgatagtaggtcagattgatatgccctgttaatgtttcttgtgcattaagcatacccaagacattagctctcttaagcaaatttgtatcatctagttgatgttccaaagcagacgcgattcctgcaaccgttgcatcccctgaaccaactggattaataacttctatttttggaatcgtcacttgatagtagtgattcccatgtttagcaaaagctcccctagcacctaaagaaacaataacccaatcaattcctctaaaaagatcttgctgtaaggtagattttaattcgtctaaactatagctaattggttttccaattaattgtgttaattcttcaaggttaggtttaatgacggtcggcttagcactagattttaaaaccgaacgtaatgcttctcctgaacagtctaaaacaactttcttattaaagtgattcgctagggagattaacctagcataataatctgaggggagtccctttggtaaacttcctgatactgttatgatagttgcagcatcaaagataagttttagatgattcaaaaaggcgtctgcttcatctttagtaatatgtggacctttttctagaatttcagtctgctgaccctcatgtaaaactgcaatacaatgacgtgtttctccaccaatacttaaaaattggtgtctgatttccaatgcatctaagccacttcggatgaaatctccaaaatccccccctaatagaccagttgccactacattatcgccaagttgagaaagaacacgagtcacatttaaccccttacccccaggtgttttggagacgtcggtaactcgatttacagtatccatgttaaagttttctaagcagtacgaaatatcaatagaagggttcaaagttactgttaaaatcatagatatctccttagtcgtgatattcaccacgattccatttatctaagaactctgtgaaaaagtcattctcttcttgatgggcattatgagtctcaacctcggctatcttttcaattaatactttgttttcttttgttggtttatatttagctcttataaacgcctcgatgatatctgtcattaacagcccaccagtaattttcccaccaaatccgataacgttagcatttaattcttctttggcatagatagctgatgtcaaatcacgtaccagagctgagcgaattcctggaactttattaacagcattattaataccaactccagttccacaaatacatacacctaagtcggcttttccactagcgacagcttctcctactttcttaccataaataggatagtgagtacggatattatcataagttccacaatcaataacctcatacccttttgtttttaaataatccacaactgcaattttgtcataagttacaatatgatcacaaccgaccgcaattttcatctgctttacctctcttacgcttagcacattttattcaacatatcgacccgaatttgatgacgacctgcatcgtaagtcccatcaacaaaaccctctactatatgtttagcaactcctggaccaacaatctctgaacctaaagtaatcatcctagcgttattatgagctctagtcatataagctgagcgttcatctgaaacttctgctgcaatcatccccttaaccttagtggctaccataaaaggaccaacaccgtaagcatcaaccattattcctaagttatcttctttttgattcactttagcaacgattgctaaggtattatcaacgaaatctttgctagtatccgttaaatcaataatttccttacctaaacttgtaaggtgttgtctaatcacttccttaagttcaacaccatgcgcatccgccccaataataattgtcatttctttctccttatttcacttttaatacaattgtatgtagttggaagatattgtttgtttttgtttgtaatatcatcatatatcttatttttgtttttgtcaatgttttgttttgtttttgtttgaaatgaacaaaaaaaactccgtgataactatgtcaactaaaattcactactagctagctatcacgaagtttgatacttcttattatttttatttgtaggaacgcttattccgcaagccataatcataaataaaatttaaacaaaacatgccaatttgctgccattttctcccataaagtgccttgcttctctgtattttgactaagaaaactccaattaaaaactttgtaatttaaagtaaaactattttgatgtttttctctatgttcataaaggacaccaaatttatcattattaagttgttgaacagagttgtaagcaaacgaaccatcttgaatgtgatggtgatataaccacttaaaactaccatttcgattaacttgcgctagacgtgcatatccatcttgacgcttcttacctggcccattagcattcactaataaaatatactcttttttgtcatgctcaaagcgaatagctgataattggacgtaagcatcatgaacttccttatatcgtttaacatggttttgccaagtctccccgccgtctttacttgtggctacttctaggttaccagttagattcctcataaataacttaatgtccccatttttcaattgaacgggtacggattctgtattttgttcttttttattatccattgttaaggagtgaattttttcaccattagaaagtatacggttatcattgactgcttttccagtatgccacgtttttccatggtcgtctgaataaattaggcgtgaagattgtgaacctcttagatgagatttccaattcgtagaataggcaggaataataatacgaccagcgtgtggcccccattttaaaactataccttttccaggtcctattcctaaaaatttcatgcctttctgacgaagacttgctgttatatctctaggtgatgaccatgtcctaccatcatcatcgctatatgacatccacacatagcttgattttgctaaacgaaatggtgacgttttatgttttgtaaaatatatatttccaagtagctgttttcccttataaatatcccctagatttgaatggtcacttttagtagtttctgttataacatgataatcagtctttttccctttaaaattatatacaatacctttgtcacggatagtaaaaaccttcgatttctttccattattatataaattaagataagactgtcctccgatttgggtatattctttttcaggtgtgttagcaatactaataacgcctcttccttctggaaacatatcatatattgaaaaaatacgtttcgtcttagagctagtatcttgaactaatgccatatccatattaataggtgagccactatagtcaccactagtaactagcggaactctagggttattacggagattgacaatagtttctctttttccccaagtgacaccatcatcctcactacggcgaataaccattcctatgtttccccaatcacaagcttgctcaattctttcatcagctcccacaagtaaagttcctttttccgtttttaataatgaggggatacggtaaccaaacacattatctttattttttctcccaaaatctcctcccctatatacttctgttttagcagaaagtatagcacctttaggtaatttgagctgatggtttagatgacaataatattgaaaataagattttatatcttcaaaattcaaattatcaacacagcaaacaaggcagtgtgccttagcttttaatttttgccataaattaccactatattttatttccttctctactttctctttgccaatagcaagcatcccctctataacagacgataactttccatccttttgagagaatgttttagtaagatggtgttcctgtatcgcattctttttaaagcccaacgatatctgactagcaatgtccgtattacctatgacattacttgtcgataaatctcccttaggaatgatatccaaagacctcaacttatccctttcaaaacctctatcctctctcgctgtctttctaaattcatcgctattaagtaatgcaaccgaataaccctttgattctatcaggaatctctgttgttctgcaatggaatgactgctttcgggtataatataggtagttctattattaggttgagttgcatttagttctgctaaatttgcctgtttacgattttcttctgtcgctatttccgattttagaggaggtgacaatttttcttgactgtcagaatcacctaagactattaccatatctttatctttttgatcatctactattaaactgtccgatgtatcagaatctaattctaactgcctctcctctattgaattagtaagcttatctaaagtagagtcaaatatgggaacagtagttttttcatcatctattgatataaaagagtttatatcagattttatttcctcactataaattgtactaggatgcaaaaatccacataataagataaaacctagcatcatatatgtactagttatcactcctagacggcgtatcgttatagaaggtttcccaaaggttaatgtcatagaaactccaagtcttaaaatattggttgcatacatcaactctagaaaaatgggagttcagtaatgtttccaaaaaggattgtataccaacttatcactattttcaatatatttttataattttactagttttttattattaagatgagcgaaaattaattatatatgttatttttaaaatctttaatatatcaaaaacctagaaaatataacattctcctaggtttttttattctatttatttttgattagctgcatattctgcattacggcgtttcatttgtttagcataccacataaacaaaccaagataagctgtcgcaaaaataattaatgttataatcgctgataattgacctgttgtcgctttaccaataacgtaaccaaagattttctccatagggccttctagtgtagagtgagtgataagtgaacctgctcgcgccccagctgggaatgcgcctacctttttagctaattcagttgcaaatggggcaatcattgttcctgataaaagaaatagcggtaatagcaatgttccaaaggtaatcatacgaattaaacggccacgtgtaacaaccagtaaagcaggggttacgcccattgcgataataccagcaagcggtagaataccattaccaactttagagagtaaaatagcttctactagcataatcggtgcaagaatgttagcacatgcccaaatctctgcacgtccggcaataaatggccagtccaaaccaatattgaaacgacgaccatgcattttaccattagcaaaattagtaattccttgagaaagtggttctactgcagcaatgaaccaagaaccaatcaaagagaacaactctaaacaagcacctgctgtaaaaccgagagaaaaccagccacctaatgctgcaaatgagaacacggggttgcccataatccctatgacaagtcctaaaatcataccaataaagaacttagagccccagaatccaatggctttatttaatttagccgcgtcaaagtcatatttatctagccctggaaaaactttatcaaaaagcttatccaaaaccataataatggggttcatcatataattcatatgcgttgaagtcatgggagaagttggacctgtccccaataaatcatcaaaggtaggtttcatcaaatcagaattgataatttttagaacaccaacgaagataatagctacagttgcaataatgacagataaaagtgttggtagattattttttttagcataccacataattaaaagacctgtgatagataaatgccaaatatcaaaaatatcaacatctaaggtatccgtttttttcataacaatcataacaatattgacaataagcatgattaataagaagtaaagcgtatatggtgatccccatgtaatagttgctaatggagcccaaccaacgtcaataatgcttagattgattcctgtatttttaacaaaagcttgaagtgattcagaaaaagcaccagttaaaataccaataatagcaccaatacccgtaagagcaatagctaacttaataccaccttcaagtgctttagaaaacttcactccaaatatcatggctaaacctgtcatgacaattagcatcacaactcccgaacccatatggataattggatcaaagaatttattgacaatatttaaaaatacctgcatgttccttctcctttaagactaattccaattttaaatatgttatgatagattgtgttctttgataacttgttctaaagcagtaaagaccggttcgctcataactggtatgcgataaagaataggtcctgcttctacaactggaattggtacattaaaacctaaatcagttttagcaataggagtaaagatatcatatttgttgaccatttcctcagtgatatccttaaccataacagcatcacaatgtacattgtaacctctatctcctaattgtgtctcgatagcatctttaatttgatgacttgagtttacgcctgcaccacaagctgctaatattttgatcatgttaaaacactcctttttctattaaataatgattaattttttctttattgtcgccaagctcatgtagccgatctaggtttccttttgtaataaagaaggtaatcaaattagataaaatatcactttggttactattcctactattaatgatgaagaaaaaatcctgaaccctacactcctcttctggattaatcatatgtttgaaagtaattggctgactatttttgacataaaagattctatctactagacaatactgcgtttcagtgtgtggaatagcaacatattgaataggagtcccatcttttaaatcaatttttaaccccgttggaaactctctctccctttcttttactgcctgtcggtagttaggactaacatagtgttgttttatcaatgcttttgatactaagtcaaataattcttcctgagaatgggcatcaataaataaaatatcttgagtcacagcaaacacctttcttcttagttaagcggttacatttttgttgtaaggcaaacaagccttatcaacttatctacatcaatattatacaaaacaaaataaaacattacaagacattttttattttattttgtttattattgtttattttttcaaaattattattattttagctctatttatggtatgatatatataacgaagaggtaggagaggtcattatgttaaagcgagaaagattacaaaaaataatagaaaaagtcaatataaatggcattgtcactgttaatgaaatcatggaagaacttgatgtatcagacatgactgttaggcgtgacttggatgaattagataaagcaggactgttaatacgcatccatggtggtgcacaaaaagtaaatgcatcaccaactccacaaaattatgaaaaatcaaacactgaaaaatacgatattcaaacaaatgaaaaattagaaattgcccaatttgcaaaacaattcatcaatgatggtgaaacaatctttattgggcctggaacaaccttagagaaattagccacgcaattacttgattttaaaattagggtagtaaccaatagccttcctgttttcaatattctgaatcaaagttcaacacttgaccttatccttgtagggggagagtacagagaaattactggtgcttttgtcggttctgttactattaactctattaaatcacttaatttttcaaaagctttcgttagtagtaatggtgtttttgaaaagtctatcgctacttacgacgagggagaaggtgaaattcagcgcattgctcttaataattcctttgaaaaattccttttagttgatagccaaaaatttggtaaatatgatttttatactttttatcaattagacgatattgattttgtattaacagatcataatattgataatgttgttaaggagcaatacagtagcttcaccaaaattttaactaataacaattacatgtaataaaacaagtgagccactactagaaacctgttatacagcttttagtagtggctctttatttagtgattataactttagtcgttttataaaagtcaaaacaagaaaacttcctcaaacaaaaatatattaactctctttttaagcgtaaaacaatggttgttcaaaagaagaattagatatatcattaaaagcttcgcacgctagaaatcataactaaaaaacaaacaagtacggtgacttgtttgtttttagttgtcagctaagtttactcaactcttttattatttcacttctgttagtgttttaatatcaacaagcactttagagccatcttttttagtaacttgaacttgactaccattaatataattaaagctttcaaaacttacactatatttatttgataattggatgagttgcttttcaaaagattgtctatccataccatatttcttagcgttttgtgccattcctagttcatattcatctagctctgattcatcttcttgtttttctggttcttcttcgtctgaccctttattaacatcataaaaaccatagttgtgagttactttccctgaatcttcaggttcttcatctggagcataatttttggctttattgtctttatttgagcctttgttatgatcactgtcgtgtccccaacctttttcttttggtaattcattaggatgttccatgtagtatttaattgttgagaagagttgttgtaatgtatagccttctggtgctttccataaaccacccttgtcaaaccatgccataggaacattatgataatgatcatgatgaggaacaatcaattgatcatcttcaaatccaactgcatatgccatgtgagcagcaattttatcaagcggtacaattttttctggttttgcttgtttgaatacttctgcagcacttaagtttttgtcactagaatttgatgttgatttattatcagttggtgcaggacttggtttatctgctttattagagtccttttccttataaatttcagcatctttaccccatccttcaactttaggacgtttttctgggtgcatcatgtaatatttagccgtagctaaatagtcttctaaagaatatgtcttatctgaatcagctaaaagatctttttcttcatcaaaccattttaattccacataatggtaatgatctttatgaggaattacaaatgtaccattcttatagtctgtcgcttgtgcaattccaaataataaatcttcaggtttaacaattgcttttggttcaattgcctcatagatttcttgagctgttttacctgtttttggtttgtcttgatttgcttcagattttcctgaaagaaattcttgagctgcttttaattccgactctgataaatctttctttggtacccaatgctcatgtgtcatataatgtaaccatcagatgttgtgtatttaccagcttttttgcctcttcaatttcttgagcactgtagacaatctggctatttggtttgcctttacgttggtctttcggtgttactgcatggtgttcttcctctgtgtgaggttccttattaggttcatgagaaatatgctttggtttctctgtagaatcttttttccctaatgcatcaatatgatgtcctctatgctctgccaccatccttgttgcttctaactctaatggagacatatccttatagtgaataaagtggaaatgattaccgtgcggaatagaaacaccgattgctgtgaaagcattaacttgtgctgggtcataaaccaaaccatcactttctacgtgacgagcatataacggttgagcatataaacgtttcaacattttgtctaaagcagaatctttgttgattggtttggttgtaggtgcatggtgttttggtgccgtagcatgattaccagctggttttgaccagtgatttgcgtgagtgactcttggaatagaaataggggcattagcatgtcttcctgttgatacattaccgcttggtgcacttgcatgaatgtatgaacttgaatttgatggttttgagctattacctgatcggccagtcttgcggttccaatatgcctgtgcggctgataactctgatggagataaatcagctttcgggatataatggaaatgatcgccatgtggtactaaaaaggcatctcccatgtcatcaatgacatctgttggactaaaaacataaccatcatctgtagtatagcgaccgctagctttcgcttcacgtacgctggctgataaagcttgagtttttgcactactatgctttcctgattctcccttagaaccacccttagaccattcttcgcgttgcttttggatttgttcctttgtacgaacatttgttcgtttgctaccttctttaagatagaggtaatacttaccgttaactttgataatataaccatctttgacttcattaatgacatcagctttattaaagacatagctagggtctttcataatcaattcttcactaatgatggcatcatatggcactttcccattgtaataatggtaatggtctccatgagaagtcacataaccgtcgtcagtaattttaacaacgatttgttctgcagatatgccttcttctttactgatttggtcgggcgttttatttacagctgttgcttgtgctttgctatcagatttatctgttttcacataagaaacactattgtctgatttttgggcattatagctacctaattggtaagcacctacaccagtaccaaatagagctactgataaagcactaataataactgtttttttacgattcatcctgcgtcctttctttatataactacctattgatttaacgatttgacaagtaccttaagattagtttccaaattttctaagtaatctttattgtttttgggaactgcttctaaaggacttaaacttgcaattttaactcgagtagctgaagctactgcttgagctaatttaggtgagactccttcttcaacaaaaatagtcttaaccttatatgttttcacaaactcctgaatttcggctaattttttagcactaggttcttgctcggttgagacacctgcaatacctaactgagtcaatccgtatcgcttagctaagtatgagaatgctgtatgtgaagtcacaaagtatttagactttgcagctttaaattttggcttatacttctctgcaatagccattgccttgtcactaaattgatcagcatttttttgataaaccttagcgtttttaggatcctttttagctaattgtgtagcgatgagttgtgcttcctcagatacttttacagggtcattccaagtgtgagggtcatacaaggttgactcatctactcctttttctgcctctacatcttctaagccatgaactttatccaaagtcataccttttgaagcttcaattacagatactttagagtgatgcaaactaggttccaaacgtctcgcccaagcttctagtgtgtgcgaatgataaagaaatagatcagcatcataaatggcagcaacatcacttgatgagggttcaaaaccatgaatacctgactgtgatcgaatcattttaatatcattcaaatcaccagaaactgcttttgtaatggaatatactggataaaagctagtcactactgacaagccatttttttgctggctttgtttagtacaagcacataagcaaattagggtaactactccgagaacaaaaataaggcttttccgtatccttttcattaaacctcctttaaaataaaaaatacttaaccagttaatattttagagtattcttattttagtgtcaacgaaaaaccataaatctaatatttttctatttttaatattgttaagtgcacttaatttcatatcaacaacctttattcatgcctttccaagctacagtaaatcttttcataaacatgaatgggttaaggagtataattagaaccacaataaaaagagccaagcattctgcccaactctttggttttttatttatttttagtatctaaaacgatagttactggtccatcattaatcagactgacttgcatatcagctccaaattgacctgtttctaccgaaacatgatttgctaattcttgattaaagatatcataaaactgattcgctttaacaggatcagctgccccagtaaaagctggacgatttccttttttggtatctgcaaagagtgtaaattgtgagatagataagacgcttcctttaatgtcttgaattgaaaggttcattttcccctcatcatcagaaaaaatacgcatgctagtaattttacgaactgcataagcaatatcttctgttgtatcttctggagcaatcccaactagaagtactaaacccttctcaatagatccgactacatcatcttcaatagaaacacttgcttgattaacacgttgaataatgattttcattttgctctcctaaccattcgtacgtttaacagaataaacatctgggataattttgattttatcaaccacagttgtcaattgtgctaaatttgaaattccaaagctaacatgaatattagcaaatttcatatcttttgttggttgtgcatttactgtcgatactagctttgttgcatttgataaggtttgaagaacatcattaaggaggccactacgattcaaaccataaatatcgatttcagccatgtactcttttttagatccatcatcatcccactcaacatcaatcaaacgttgttcgtagttctcctgactctttaaattttgacaatctgaacgatggatagccacgcctctacctttagttatatagccttcaatgagatctccaggaacgggattacaacattttgcaatacgcattaataaacctgaagctccttgaatgataacaccattttcactcttaactttgagaacatcacgcttatcggttttgatttcaccaccgttaataagttcgtctgcttccgctttagccttagcacgttcctcctcacggcgttctttttccgtcagtttattaaaaatactaatcggactcaaatcaccaaaacctacggctgcatacaaagcttcctcacttttaacactgacacgtggaaggatttcttcaatatgtttcttatctaaatatttgttaggcacataaccttgttcttggaaataatcaaccagtaattctctacctttattaatagaagtttctttatcttggtttttgaagaactgacgaattttattgcgagctttattggtcttaacaatcttaatccagtcacgacttggtccaaatgaattagggtttgtgataatctcaacaacatctcctgtttttaacttagcagtcaatggaaccatacgtccatttactttagcgccagtagctttttctccaacttgcgtgtgaatagcataagcaaaatcaattggtccagattcccttggcaattcctgaacagcaccatttggggtaaaaacatagatgcgttctgtaaagatatcttccttaacagagtcaacaaaatccttggcgtcttttgattcatcttgaagctcaactaattcttgaatccatcccataccaaccgattgctctgcttgattaaccttactggtgattccttttttataggcccaatgggctgcaacaccaaactcggcaacttgatgcatttctttagttcgaatctgaatttcaattggccctttaggtccataaaccgtcgtgtgaatagattgataaccattggcctttggtgccgcaatataatctttaaaccttcctggcataggacgccataactcatggatataccccaccatggcataaacatcactagcagtttccatgatacagcgtatcgcaattaaatcataaatctgatcaaagcgtttctttttatcacgcatttttctgtaaatagaataaatgtgttttggtctaccataaatatcaccatataaaccctgttcctcagtataggatctgattttatcgacaattatatcaaccaactcttcgcgttcacgacgtttttcactcatcatatgagaaatcttataaaattccgtctcattcaagtaacgaaaagataaatcttctaattcccacttgatacgactaatccccaaacgatgcgctaaaggagcgtatatttccatagtctcacgtgaaatacgctcttgtttatcttttctgaggtgtttaagggttctcatattatgtaagcggtcagcgagcttaaccaaaataacacggatatccttagacatagccattaacattttacggtgattttctgctaactgttcttcatgagatttgtactccactttacccaattttgttacgccgtcaataatatcgcgaacatccttgccaaaatcagtttcaatctcatcaagggtaatttccgtatcttctacaacatcatgtaaaaaaccacaagctaccgtaacggcatcaaggtgtaaatctgcaagaatacctgctacttgaattggatgaataatgtagggctcgcccgactttcttgcttgataataatgagctgcggttgcgtaatttaaggcaaattttacaaaagcaacatccgtctcactcatgtactgggatgtgattgcaacaacctcttctcctgttaaattaatttctttgaccatagttatcctctttaatcatagtgatagattgtacctattttatcactttttaacctaaaaataaaagaagttagaggctcaaaaagaattaaataccaagtaaatgtgtctaactaagttatcctttataaataaacgattgtttttggtgtaatcactaaaaataattcgtaaatgagattgattaaacgttttcaataagctataatagtttttagattaggataatatacatgtaatgttttaatggaggagatttatgtcaaaacattatttttcaaaaagcgtattcgctttaactgtcttaacagctacagcaacaagtggtttagctgttcaagcagaagacattgttacaacaccaagttcaacctctacaaaggttgaatcaactacccccactagcacaattgcagaggaaaagtcaaacgttacttctactccaactgcaataactgatgcttcaacagccacaagcacaaataccactaccaataaccaaaatccacagcctgttgccacagaagccacaactagtgatctcaaacctattgaaggtgaaaaagttgaccttcgcatcatgtcaaccacagacctacacaccaatttagttaactatgattattatcaagataaagaatctcaaaaaatagggttagcaaaaactgctgtccttattgaagaagcaaaaaaagaaaatcctaataccgtcttagttgataacggagatgtcattcaagggacacctttaggaacttataaagcaatcgttaaacctgtcgcagaaaatgaagaacatcctatgtaccaagccatgaatgctcttggttatgatgcatcaacactaggtaatcatgagtttaattacggtttagattacctcaaaaaaatcattgctacagccaaccttccaatcctcaacgcaaatgttttggatttcaaaacacatcaaccagtttttaaaacttatgacatcattactaaaaccttcaaagattcaacaggaagagctgttgcactaaatattgggattacaggaattgtacctcctcaaatcttaaactgggacaaggctaacctagagggaaaggttattgtcaaagattcagttaaagcaatcgaagaaatcgttcctactatgcgtgctaaaggagcagatgtcattctcgttttatcacactctggcattggagatgatcgatatgaagaaggtgaagaaaacgttggctatcaaattgccagcatcaagggagtggatgccgttgttacgggacactcacacgctgaatttccatcaggtaacggtactggcttctatgaaaaatacactggagttgatggtatcaatggaaaaataaatggaacacctgttacaatggcaggcaagtacggggatcatcttggtattattgatttaggacttagttatactaatggaaaatggcaagtctccgaaagtagtgctaaaatccgtaaaattgatatgaactcaacaactgctgacgagcgtatcattgcattggctaaggaagcacacgatggcactatcaactatgttcgccaacaagtaggtacaacaactgcgccaattacaagttactttgcactagttaaagatgacccttcagttcaaattgttaacaacgctcaacgttggtacgttgcaaatgaattgaaaggaacacctgaggcaaatttaccacttctatctgctgcagcaccatttaaagctggaacacgcggcgatgctaccgcatatactgatattccagctggacctgttgcaattaaaaacgtagctgatctttacctttatgataatgttactgcacttttaaaagtgaccggagcagacttacgtgaatggttagaaatgtccgctggtcaatttaaccaaattgaccctaacaataaagcaccacaaaatattatcaataccgaatatcgtacctataattttgacgttattgacggcttgacttataaatttgatattacacaacctaataaatacaataaagatggaaaagttgttaatagtcaagctagtcgagtacgcgatttaatgtacaatggtaagcctgttgcagacaaacaagagtttatgattgtgaccaataactaccgtgctagtggtaccttccctggggctaaaaatgccacaatgaaccgtttgctgaacttagaaaatcgccaaactattatcaactatattatttcagagaaaaccatcaatcctacagctgataataactggggcttcacagagtctattaaagaccttgatttacgattccaaacagccgataaagctaaaaatcttgttactaatagcaaggatattcagtatatcgctagttctaccaaagatgaaggatttggtgattatcgatttgtctatactgaacaagaaaaagtagaccttactgagccatcacatcaagaaaagttaagccaaatagaaaaacaaaaaattcaccacatggttgcaactgcttatacaaaagcaaaagcttctccaaatattacaggcactgtctatacacaacagaaagaaaaaacattacctaaaactggacaagaaaaacaatcttatctggctttctttggtgtcgcaatacttggactcgtgggaagtttacttaaaaagaaacaaatatagtcatcactaaaaactgaggccaatcaacctcagtttttagtctcaacaatagattttctctctaaatagtcagatattgagataccactctagcttgtttatctgacatgattttgctaaactgataacaagaaatttagatttaaggagtactaaatgcctaaattaaccctagtctatatcagtcttagcggcaatactcaaagctttgtcaaacgtcttagtgaacaactgtcaacttggcataactgtcaggtttcgactattaatatcaaggaacaaaatcatcaaacctttcctgttgaccaacctttcgtagcactattacccacttaccttgagggaggaaatggcattgacaatggcgatcaagaaattcttaccattccacttggtgattttatagctgcacacaataatgtcaaaaattgtatcggaattgttggctctggaaatagaaattttaacaatcagtactgtttaactgcaaaacaatactctgaacggtttggatttcctatgttaggagactttgaattgcgaggaacttctagcgacgttgaacgtatcgcaaatattatcgttgaaacattatcgaactttaaagcctaaaggaaatagtatggaaacaacattaaactacattaaaaccctgacatcaatcccttcaccaacagggtttacccaaacaatcatgacctatatcatcaaagaattggaagcgtttggctactcaccaattcgcacaaacaagggaggcgtcatggtttctctaaaaggaaaaaatgatactaaacatcgcatgataactgctcaccttgatacacttggtgctatggttagggccatcaaaccagatggtcggttaaaaattgaccttattggtggatatacatacaatgccattgaaggagaaaactgtactatacacctctcaaaaaatggtaaagaaatttctggaactgctcttattcatcaaactagtgtccatgtttacaaagacgctggaactgctgaacgtaatcaaacaaatatggaaattcgtttagatgagaaagtaacaactgctgacgaaacacgtgctttaggcatccaggtcggtgatttcatttcatttgatccgcgtacaatcataacagacagcggctttattaaatcacgttacctagatgacaaggtatccgctggtatcctaatggaacttctttctgtttacaagaaagaagacattcaacttccttatactactcatttctactttagtgcctttgaagagctaggacatggagcaaattcaagcatcccaaatgaaactgtagaatatctagcagttgatatgggagctatgggagacgatcaagaaactgacgaatatactgtctctatctgtgttaaagatgcttctggtccttatcattatgaattacgtcaacatcttgtttctctagctgaaaacaataatattccttataaacttgatatttatccttattatggtagtgacgcctccgctgccatgcgtgctggtgcggaagttaaacacgcgctacttggtgcaggtattgaatctagtcattcttatgaacgtacccatatcgattctattcaagcaactgaactcttagtggatgcctatctcaaaagcaatatggtggactaatggtagccacgctcattattatcaggggaaattcagctagcggaaagtctacaatagctaagcaacttcaagccgaattaggggaaaatacccttctcttatctcaggattaccttcgtagagagatgttaggaactaaggatggtgaaaatactactaccattccccttttgatcaatttactaaattatggttaccataactgttcctacatcatccttgaaggcatacttcgttctgattggtatacgcctgtttggaaacatattttaaaacataaccccaacaatacttatgcttattactatgatttaagctttcaagaaactgttaaaagacattcaactcgacttaaatctttagaatttggagaagattctcttgcaagatggtggcttgagaaagatttcttaaaagagatacctgaaaaaatattaacaaaagctatgagtttagaggatgtcaaaaaacttataatgaccgacgttttaccttaacattattgtacgcactataaacaataatgacttcttatcattggagtatattgcccatggatacagtgattgacctcttatttattatcgttcccattatagccggatttctggcatgtattagtctttatcgttattggaaaaaagatttcgaaagcgacgaagacgacgattaaactcctcggaatcaatgattccaaggagtttttctatattctcatttaatcagcatttctacgaatacgattataggttttaaggatttggcccttatgcttagtgacatagcgataatcttctttaagagtagcaatatcctttaaagctttcatgccattactcgtttgggcatctttacgaataggtcggttactcgttgactgcccaaaggcattttgaacatctaaagaaagcataaaattaataaataactttgcttctttcatagaaggagcattctttataattgcaaccgaagatgggacaaaaactgtcccttctgtcggatatacaatagaaacattggcaccacttttttgcaaattgacactagggtcttcgtaagtcagccccacaatcatttttccttctgcaactgattgataaacttctgaagagctagaagatttgatagcattaatattatgttgtagctttttaacatagttccacgcttttggattggtgtaaccacccttggccaagagtatattagtgagttgtgagaaagcactagaggaagtattcggatctgcaaaggcaattttaccttttaaggaaggctgtaataaatcttcataactcttgatggtaagtcccttagctaattcgttatttacaatcaagacactcccatttatagtataaggtgtcgccgtatcacttggatggatatagtctggaataacagtatgaacattctttgatacgtaagactcaaacaatgccttatgactttcaaattgcgtataatttcctccaaagaaaatatccgccttcaactgcttaccctccttacttaatctatctattagttgccctgtcccaccttgaataagcttaacttttataccgtatttttcctcaaaagctggaatcgttcctgttaaaatggcttgactatttggacttagaataactaattcttttggtggaagtagtttagaaggctggctaatactgtatgtaaaaacacttataaaaataatggaaacaaccagtagtatataaataagccttttcgactgtttttctttcatctttcacctacctaatccatttgtttaaaaatatgttcttccttaaacgcttttactgtctgacccaagtactttttaaaaaccctatcaaaataacgataatcataaataccaacagcttctgcaatttggtaaaccattaggtctggttctctaaacatcaactgaatggcttgattaatacgatattgatttatataatcactcaaagttatatgaaggtgctttttagtgactgtgtaaagataactttcactgtaacctaaatcgtgagctaactggctaatcacaattttcccatgaaaatggctatgaatccatgctagcatatctttaataacttcaggaacttggtcattagcttgtggtagaggtaaatacaattctgtatgctcttgtaggtgcttctccttatgttcctcaattctagccataattgtttttaaacaatcaatcaaagcttgcttttctagtggttttgttaaaaattcaagaacgccatagtgaatagctgattgcgcatttggaaaatcagcatagccagataaaataattttggcataagattgtcctttggttgcctcaaacatatcgaatgctgtcataattggcatattaatatcacttaaaacaatgtctggctgctcttcctgaattaattgagctccttctttaccatcttttgcttcaccaaccactaaaatattcaatgattgataatcaatagcatagcgtaaccacttacgaataaggtgctcatcctcaacgataagtaatctatacataactcactcctttactatatagctaactcgaaaagcatcatctgtcttcgtaaactctaacaatactgttgaaaattgatattgtaatcgtctataagaattaataagcccatgatgcgagtgagttgatcttaacattgtacgtatggcttgttgcctagccaaactaatacctgatccattatttgaaacagtaaaccaaattccatcactatcttgccaaatatctatgtttattgctacatcatgacgttcttttaagccatatttaatagcattctcaattagcggtaacaagaaaagttttggtacacgcatgtgttcaagttcaggagatactgaaatagtgtaagttaattcttcaaatctcacttgattaatcaaaaggtaggattcaatgattgctaaatcatccttaagcacagctgcttctgtgctaccactaaggctatagcgcaataattttgttagttgtataacgattctttctgttaattgtgaatcatagtgactggttattaaaattgtctcaagggtattataaaggaagtgaggattaaactgagcttctaacatcctcttttcaaacaacaacttttgtgtttccaaatcaagagttttctcatgtaaatcttttaaccgtgaaaccatctgattgatttgcacagatagatattgaaattcatcttgactatcaagctcaatactagatttttcttggcgggaaatggcatccatatctagcaccatttgatttatggcgctagaattttttactgcgatgcgatcggctagaactctagatttttgtcgtaaaatcacaaaaataataactgatgatactagagaaaaaaggacgaccagagttactggtatcaggggacgatacatgtaaagtaggatattgtcttgcagagctactttcctaacaacaaaagctcgatgatcgtgaaaactaaaatatctagttaagaattgactatctaccttatctaaactagaggagataaaatcacgattagtaaaagtaaagctattatttagctgatcggcaataatcaagtctgagttaatagccttcgttggaagtaaaaagtctttcccattcatcaataaaaaggcataacctgaaacttttttattaactataattggcttaatgagtgcaaggtaatgccctccctcactatccacaataatttttagtagcctttgatttattttagccttatctaaaacttcactaatgtaaatagacttactaaaaaaattacctaaatgtgaattactagcaaacaaaagttcttgattaggtgagaatactaaaagttctgtttgactttgtaaatgattccttaaatgataatattgcttactcaaatcagcacttcctaagtgtcctgagacaaatggtttcaaactatttttacctaagtcatctaataaggtatcatgtttttgaatcaattgcttataactataggaaactgaattaacatctttataaagacctatctgttgaggcgctaaagaaaaaaggacgaaaagtgcaatcaataacaaggataaaattaaagactggcgggaaaaatgtttagagatatcatcttgtagtcgtttcttaaagcgttcttccattctatatcctctcatttccatctccttttattatagcaaatagctatccaataaagatagtcaactcctttcatacaataactttcaaaagaaaaaaagataagctaaacaagtatcgtcttgttccacttacctttaatgctaggagattattagcaaatacctaagagaccaagtacaatacctaacaccataataccaaacatgatccagttgatattgacttttttacgtagaagccagaaggctaatatcgttaccaacagtggcactacgccaacaaataattggtcaaggtaactttgtatggaagctgcttccttagctcctttagctgctaccgttaagattgtcttgaatttaacatttgaagcagtcattgagcctaccatcattaaaccaagcatacttgaagtcttagtaacaattttaataccacctgattcatacaattttttgataaaccctgcacctacagagtaacctccatagagactataataatgaatcagaaaagctggaatgttatacaagagtagaaagacaacagctcccatggctgagcctgtacttgctaaggagataccgatacctgccgcaataacccttagaattccccaaaagaatgaatcaccaacaccagatataggtcccatcaaagaagccttaactgcggtgatagcactagcgtcaaaatcaggatcttcactgtttttcttttccatagatgcaacaagacccataataaaattattaatgtgcatggtggcattaaaccatgttgtatgacggaccagtgcctctgctttatccttatcagtcttataaaaacgattgatgactggtagtaaagtataaataactcctactgcgtggtattgtgttgccccagtacgactggcattcatcgtccatgagcgccagaagactgagcgaagcattttacggtcttctttagtcaaattatcctgtgatttcatgcgaagaagtcctcctcttctgattctttagagtcaaaggttgtctgtttactgatcgcacctctagtaattgcgtctaattctatatcacgttgtgaactaatgacgcaaataactgctcctagggcagcaactgcaaccgctggtaattttaaataagctgttaaaacaaaaccaagcaagtaaaaaacagctaatttatttgtccataataatttcatcagcatggcaaaaccaacagctggaaggaggcctcccgccgcactcaaaccattcatcaggttttgaggaatatgatggacaaaactattaacaggcccactacctactaaaataccaatgaaagaaatagaagcgataatgagatagtaaataatccatgtaccatagtgaagcatcacaagtttaccttgatggtttgcggctgcagctttatccaccatcggtgcaaagatattcatgaagacgtttttcaaaaacataacaacaaatgctgccaacattccaatcggaacagctagagtcattgctgctttttgatcaatgtttgaaataatggtaaaagttgttgccatcgctgttgctgttactggctctgcggcaataacacccccaatattaacgtttcccaaaaatagcgcttctagggaggctcccattaggataccaaccttaatatcacctagtagcattcctgttacaagaccaactacaagtggtctctccatcatactttgacctgttaagtaatttcccccaaaacaaatcaatacagctaaagctgccatcgtcgctggcattatcatatgtcatacctcactttatttgactaactgactcaagttaaccttagtatttgaaggcaatacttggttaaagacgtctaaatctggtaagctggctaattcttttgcggcttccaactcttctgtatttaataagagacttgatgttagtttgacttttgtagctggatcagacttatcaaagcgtcctacattagcgacgtttactgcttctaaatcggttatatttttagcaattgtacaggcatctttaacagaattgacaatcacaaaaatgcgcttgtcagttgcacgtggatctttaaatagagctattgattcttcaactgaacggattaataatttcatgccattaggcacagccattttaagagtcatctgtgtgatttcattttttgcagcttcatcattagccaccactaaaagtggtgcatttaattctttagtccatacaactgccacttgcccgtgaatcaaacggtcgtcaacacgaatttgagtaatcatttttttcctcctaattattaatcgaaaaagtcatcttctgaacccgctttaaagctaagatctaccagctgcacttgagattcattgataacggttacaatttcttctttagttaattcctcttcaggtttcaaaaatagtaatgacaacaaggtcgctaaattgctgttcgttattaaaaaaatattatttttcccactattcattacagcagtcgccattttctgattaacgctgccacctaacaaatctgtaaaaataagcccctgttcatctggtgcaatctcatcaataaattctacaatagacttagtatagtcactatcatcaatgtaagcatctattgtctgaatctcttgtcccttgcctgtcagaatatcaatagaactctgcaacccactcgcaagttttccgtgactgccgattaggaatttccgcttcatctttctcctcctatttattacattaccctaaattagttctgaaagttttatcaatactttgaataagataacctttactatcattctaacaaatgaaagcggtttaaaaatggactattctactctatatgtggactattctacataattaatatttaaaaacagaacaataaaaaggtcatgtatcctaatagtttacacaacctttacatcactataactttaaactttctcttatatgcatcactatttcgaaagagataatggaataattttttgatagggtatcttattaacaacctttattatgagtagagcacaagcatgtgttaatgccaaggtcaccacaaaaatcacttttccttgatggtgtgcaactaaggaagttgattttaaacagtaagacactatgccaataaaaagagggggaaggaagaaataatagacactcaactgttttaaaggacttaaacgatattccttaaacagtgatgtacgtatactccagttaaataagaatactgcacataaaggagctaataagaagaaatttttatccaacccttgattaaaataaataagaacattctctaaagctagaagtaaaaggaagagaatatacttaagaccacgcgatttggtaaataggtcagtattaaaataatcatagagtaaatatcctgctagaagataaactggagtgtaaaataatccgtttcgtgttgtctgaaaaattgacatataagtggacatcaggggataaaattttgttgactgtataaagacagaataggtctctactgctccaatacaatagagtacaacaactgtgataaatgtccccctagttcctacatacttcaataatccttgaataatgacccaacctagaataacagcagggatgtaccaaagggtatgtgacatacctaaatacaaaaatgccacaataaaccccggcaacaaatagatcttcgctatatttagagattcaaaaaagaaataaccataaggcaaataaatgatagtccacatgctatactttttaatcagtttacgaaagtaggagtgattacacaaaccttgctgtatacgacctctcaaaaagaaagcagtacaaatcaaaaaataaggaacagccatccgacctaggaaacttttaaaggtaaaatgaatgacatcctgactaaataacctcccactatgaactaaaatgaccagtatggaaaaaaggtattgtagcaaactaatcattgatgtattatgctgcttattatccacgcactgacttctcttcatccttaacattactttctataagttatcattactatgataccaatctcttcagaagaatatctcaattatcccaaaaagtcattgaaacgccttaaatggtatctgataattattgttaataccttatcaaccatattaggaaataaaaaagctgatttcgcaaaagaaaatcagcttagaataatttcttgttcagataaccagtgggaactataaacttcttcgtcgcattaaacgataggtataggctatcaataacactgcaattaacatacgtagactaatcagacagatttcattagcagaaaaactatcaaagaaaaagccatgactaccattacgtgataattttaaaagtaaagctgaagtgtctgtcgttgatactgagaaaatagttaataacttgtttatcacacctttattaaacatagccattaaaaagctaggagcaaaaaaggcaagcgttgaaacagcaaaagatgttaatggcgaatttgtgatacttgatataaagaaattaagactggctataaaaaggagtccaacaaattgtaagacaataatatgaacaaaagcagttgatattgtcataggtacaggaaatcccataatattagccaaaggtgatgtccagtataaattcagttgaacgcttgtctcccaaccactaaaaccaaaataatctgcaaataccgtcagaatgagggcatatgctaggataaatgtggaaataccgatggtcattgtactagctaacttagcccaggtcaactgaccacgtccataccgagtcgtcagtagtataggattaatcttcttagccctatctcctgaaaaaagaggagctgataagaatagagtaaataagacaattaaaatataagtactattacttacttcgaaaagttgattccaaggagcaaagttacctagctttagttgttttagtggtagcgcagaacccaactgtttttgatctttaatatttattttattaaaatcaattgttttatcatctttcaattggttatagtaaattaaaaaatcacgatcaaaagtgtctgccacataataactaaaaacatcaaatataggggggcgtcctgctggcggattaacatagtttttaataatatttgttactcgttcttcagataaatcccctgaatatttttcagctattctacgattaatggcaaccgcttctcgaccatgtattttatctgcagaatagccactaatttgcccaacaaaaaaatgctggtaaaatagaccaaaaatagcaagaaggaagataataaaagccccaaatgctgccttacgttgtagaagtttttttaattcaaaaggaaaaattgatatcatcttacttactcccctctaaaatgatagatgtagaaatcttctagagtcggaacaaccaactgtgccgaatcactcggacaaatatcactcactacacgaaatacccgactatctgaaaagactttttcattaacaatagcaatattgggtatctgagataaacctggttcagtcgttatttcccacacttttccctcaatagttttcaacagctgtgcggtgttgccatgttcgataaatttaccattttttaatactataatttctttggcaacagcttccacatccgacacaatatgcgttgataaaatgataattttattggtggataactgactcaaaatatggcgaaatttaacccgttccttgggatcaagtccaacagttggttcatccagaatgagtatttcaggatcattgataagtgcttgagcaatgcctaaacgttgcttcataccaccggagtatgatgaaatcttctttttacctacatcgcctaaaccaacaagctctagtaatctaggaatttcttgtttagctttctttttatcaacaccttttaaggtagcgatataatttaagaaagcaatgccagtaaattgatcataatagcgaaaatgttgcggtaaaaaaccaatgtgacgataaaattcttccgactgctcctgtccattccaataaatattcccactatctgctaatgtaaagtggctcatcaaatttaataaggttgttttgccagtaccatttgctcctaagagtccatacaaaccaggagtaaactggtaggaaatctggttaagtactatttttttcccgtagcttttagtgatattatctagctgtaataacatagtattgtctcctttcaataattaagacagttgaaaaatcaattactaaaatatagcgactgagctaaaggttaaaaatgagctttctcacttactctctaaatgattgtaaagtaatatagctaaaagattatttctaagccctgacggaaagtatgttgttcactatttgtactaatagatgcattgggataacggtcaataactttcatgacattataaaggcctaaccctctatcttctcccttgctacttgctccataaccaaacaaacgtgaagcatctattctttcctcgactatcgaattttctatgataaaaatttgcttatggtttaatgtaaaataagacatggctatcttaggttcatctgtctctaaagaaacttcaatatggtggctataatctatcatattagccaattagagttttctttgaacaaccaacctctcctgtaaagaagttttgaagtaacggtctaaaatagaactcatctttttctatccttttgatatttatccactatagatactatatctctcactttattgcgtgaaaccagacaagtcgttccattttggaagtaaactaatctatctatcctatccactttaaaaatatttaagggatttactaaaaaagagcgatgacattgaaagagcctaggttcttgttttaaaatatcccccaaagtggctgtgaattccattctatctttttcagtataaaggacaactctatgtgatcttgaggatgtttctatataaagaagatcgttaaaaggtaattgtacctggctgtaacgcgacttaaagtagaatgaattttccactaagggcttattgcaaatgccatctacgtacaacaatacttcctcaatcctttggctaaactcttcctgtgaaagtcctttatcgatatagtctaaagctgatacctgataacgaaaggttaaaggcattaattctgaatgagttgtaacaaaaacaatctgagcatatggatcaacttgtctaatttgttttgctacctctaagcccatctgctcatcattttttatttcaatatctaagaaaaataaattatgtaaacctatttcataaattgattccaataattgaactggtttagcaaacgtttctactgttttgaaatgcagattgtactgtactctaatctctttaatgattttttcaaaatgggcttgttgaacaaaatcatcctcaagtataaaaatattcaccttatatcctctatcttattacttgaatattaatagtcacaatagagccactacgatattcttctcataggtatcgtttatgagttatcccgtcttaatatgtgacgtccatgaggctaattttaaaagcataataaatatatgctaattttaacatatatataactatttgaacacctaattaagtagttaagtattaaaaataaattatttctattaaaatacccttagatacagactttatctgaacctaagggtatcttttattataagatattagaaatccatggtaatttccaagccgtaatgatcactaacgacaggtgcttcaccaccttcaaaaactacttgacttgaactgattgaaaggtcttcgctagtaaaaatatggtcaactttaagagcctttttattcccttcccaaccatcaatatcagccataatagtatggtccccaaatacatgattggctatttggtggctatcctttaatgctaatggactattaagaacaagttcataaccctgatttccagtaggattattaaagtcacccatgagtaaaagtggagtttctacctcaagtagggtagtttctagtcgtttccactcctccgcaaatcctttctcaaaccatgagaaatggaggctaactactgtaacgactttgtcattcagagtggtctcagctaccagagcacgacgagtatgataatcagtctcatcgtctacagctgaaactaaaatatcctctggctttaatggtttcagagaaagtatcgctaccccttcatggtacttactataaccaatatgattataagcccatgtccaatgatagtgtagaccttgaagatttaggtaatgcactaattgcaaggcaaagttatcttgatgaagagctggtgtaccttcaatcggatgataatttggactactcttagcaagaggggaagatatgctctggttcacctcttgtaggcagatgatatcatatttttcacggaagatatgctctgctaaatcaaataatttctttagagcatttacttccatccatgaatgagtatttaacgttaagcattttgccatagagtatcctttcatcagaaagaagctgagacttgcccatctcctatcgtttgttacagttcgacttttgccacaactgttttagctatttgtggacctgatttttcaagtttaacagtttttatatctgaaacatttgtaaagacgataatcacacttgtctctttaccagctgctttgatagcttccaaatctgctactacagcaagatcgcctgctaccactttttgaccactagaaattttaacctcaaatggttgaccatcaagagctactgtatctagaccgatatgtactaaaacttctaggccactttctgttaataaaccaaaagcatgttttgttggaaagacactagtaactgtacctgaaactggaacataaatattgccatcagttggttccacagcaaagccatcacccatcattttttgagaaaagacagggtctttaacaacatccaatgcttctacttgaccattagccaccgaaacaatttcttctgttattcctttataagttgtaactggggctgctgctacaggttgacctgtttctaaatcaactattggaataactgtacctgaatctagcaaatcttgaatgtctgatttaaggacatctgctttaggtccgtaaatagcttgaacgccattaccttttaacaccaatcccattgcaccagcttttttccaagctgcttcagaacccacgctatttccatctttaactgtgacacgaagacgagtcatacatgcatctacatcttcaatgttatcacgaccaccaagtaaattaataacttgtacaacttgagaatttgcatcagcagaaccagaagctgttgaaggagcattatcaacctcttcgttatcataattaccattacgtcctgctgttgctaaattgaattttttaatcataaagtttgcaataaagtacatcaatactgcaaaaagaagtgtcacccaaacaaagttgaaaatatcaccaccaaggcccgcttttatgcccataggaacacgtgttaaaaattctatattaccaaatgaatgaacgcggaggttaacaatatctgccatagcaaacgcacatccttgaacgacagcatatacaaggtagagtggcattgctgcaaacatgaacatgtactcaattggctcagtaacacctgtcaagaaagtagccgctgctgctgaaataaacattgacttgtatttcaattttttatctttatcaacgttacgatacatagcataagataatcccatcaaaatacctgaagcaccaatcatttgccccactttaaaacgtgctggagtgacacttgtcaataagtgatggtattgacttgaatttgagccttttaagttaattaaatcaccaacccatgctaaccacagtggatcttgtcccaacacctgtgctcctttagttgcacctgtaaggacagtgtatgtgccacctagttgcgtgtagttcattggaatagttaacatatggtgtaaaccaaatgggagcaataaacgctctaacgtaccgtagacaaatggtgctaatattggagcactgtcttgtgaacttgcaatccatttaccaaagccattgatacctgattgaacaaccggccaaaatactgataaaattaatgcaacaatgactgaacgataaataacaacaaatggaacaaaacgttttccattgaaaaaagttaaagcatctggtaatttacgatagttataatatttattaaaggcagttgcaccaacgaaacctgaaataataccgacaaatacacccatattaagagcaggttgcccaagaacgttaacaaagtaatctgaaactctgatggttgcaccaaataccgtttgaacagttgctttactgtctgctaacatatctgttttaacaccaaaaaagttccctgtaataaggttaataagaataaaggataagccagccgcaaaagcaccaccggcacgttctttagcccagctaccaccaatagccaatgcaaataagatgtgtaagttaccaataactccccaaccaatttgagcaataacattagctatgcgccctaataaaacatttgatggatccaatagactaatggagttaccaatactaaccatcaatcctgctgctggcataacagcaataacaaccatcaaagccttcccaaacttctgccaaaattcaaaactaaagagctgtttgacattatttttcatcttcaatctccttttatgcacttaatagtgcaagcgtttgcgttattatggttttattatagcacttatttgttttttgtaaacccttacttatatattttttctgaattactaaaaaagtctagataatatcatctagacttttatttgtgagtttttattgtttgtgaagtaaaacggtcattgttgttccctgccccaaatggctgtccacttttatactaccattgtgaaaatctaaagcactctttacaatagacaaacctaaaccagtccccccaactatttttgagcgacttttatcgacgcgatagaaacgttcgaaaatacgttttttgtccttctctgcaatgcctagtcccgtatcactaacttctaaggtaattgtatcaggtgaatttttcaaagtcacatttacttgacctttctcatggttataggtgatagcattgtcacacaagttgtacaccaaggaattcaataaaactggattccctcgcaaaatagcttcttctccattaaaattgatttgtatgtgcttcttatctgctttagcttgtaaaccttctaaaactttttgtgttaagtcatacagatttactgtctcttgcggtaatttttcttgttcatcaaggtgagaaaggttgataatatcctcaaccaatttaactaatcgttcagattctttatgaattttagctgcaaattgtgggacttcttcgtttggaaccatttgattagctaacagttctgagtaaccagaaataacatgaagcggggttttcaattcatgagagacattggcagtaaattcacgttgaagttgttccatttggagttgatcagtcacatcaaacagtagaacaaccaatcctgttactcggttgttatctgtagttggtcttaccaagacgcggtaatgattattttcaatgccaatattagcctctttctttttcccttttagtccttgatcgattaagtctttgagagttaaatctcggctaacttccatcataaagcgcccatgccaatcatcattaatttggaataactttaaagcttctgcgttgatactaacgattcttgcttgatcatctaaaagaatcattccttccttaattttagaaataatggtatcaaattctttttgacgcttttgtaataacagtttttgatgttgaatcttagcctgatggctatcaagacgccttaataatggtgttatctcctcgtaactatcatttgataaaggatgatctaagtcaatattgtttaaaggctctgatactttttttgctatatatcgtgcaattaatacagataaaataatagcaagtaagatgataattgctaagggacttatcataccaaggagaagataaaaaatagtttgttgcgcaactgataaacgaactatcgttccattatttaaacgttgcgcagcatagatagacttctcagtaagtgtcgctgaccacctcgtgctctcaccataaccactcttgatagcttctttaatttcttgacgattggcgtgatttttcatatgttttgcatctgattgggtatcataaagcacttgtcccttattatctacccaagtaatacgcacatttgaagttttaagattttcaaaataatctttaccttcaaaggaaattccttgtgacgccagtgccgtttgtgttctcaactgttctcgctgaatgtgattgaagtaattatagagaaatcccataatcatcaaaattgtaactaaaacaattcccaaactagcagataaagttgtacggaaaatttttttagtcatgtctttcctccaaacggtatccaactccccttactgtagcaatcaaatagccatcctcaccaagttttgttcgcagtgtcccaatgtgaacatccacagttctagtttctcctaaaaattgttctccccaaaccttatccagaagttcttgccttgtaaagactctattgggattacggaagaataatactaataactcaaattcctttagggttaagtggattttttccgttccccttttgacccaataattagtcggatcaatctctaaatttccaatgataatatgagcttttgaatctacttggcggctacgtctcaagactgcttttattcgtgaaatcatttccatcatcccaaaaggtttgacgagataatcatctgctccaagatctaaccctttaactttatcatactcactacctttagcagttgtcatgattactggtatcatttccgtttgatgttttctccttaaacgctctaaaatagtcaaaccatcatctcccggcaacataatatcaagcaaaatcaagtctggaactttctcctgaatagcttcccaaaaaagctctgaactcgaaaatccttgagctttaaaacctgccatttgcaaagtatagagcatcatttcgcgaatatcagcatcatcttcaacacaatatatcattacgcttctccatctaggttacctgttattgagaaaagcacccacttagcaatatttactgtatgatcaccaatacgctctaggtacttggcgatcattaaaacatctatgggatattcaccatcaacatcctgtaccgaaaaatataacactaactgtttctttattgtatcaaattcctggttaactgtcctatcttgttcaattacttgatgcgcttgttcttcattgtcataaataaaagcatctatactcttagtcagcatactaatgacattattagacatgctgttaagttgatccctttcagaacctgaaccttggataatatgacctaaactaacaatttccgcaatttcataagcttgagcaccaatacgtttcatatcataaaccatttttaatgcagaagaaatacggcgtaaatccttggcaactggttgctgacggagtaaaagttttaaacatctctcctcaatatcccgttccatttgttcaatcttgtgataagtttcagaaatatcgtcaaggtaaacgtcattactatttgttagagcacctaaggacttcccaatgatgtcctcacacaatgcccccataaaaataatttctttattaaggtcattaagttgacttgcaaatcgtgaacgaatcatccgaatctccctgtaatgtagttttctgtacgctcatcttgtggcaatgaaaagagttggctcgttttgttatattcaaccacttctcccatcagaaagaatgctgttttatcagaaatacgaacagcttgttgcatattatgtgtcactataacaatagtgtagttcttcttcagttggataaccaattcttcaatttttgctgttgaaataggatccaaggcacttgtgggttcatccataagtaaaacatcaggctcaatagcaagagcacgcgcaatacacaaacgttgctgctgtccgccagacatacccagagcagatttgtgaagacgatctttaacctcatcccatagagccgcctgtttaagggaacgttcaacgatatcatctaactctgctttggaatgaataccgtgcgttcttggaccaaaagcaacattatcataaatgctcattggaaacggattaggtttttgaaacaccattccaacctttttacgcaattggttaatatccaattgtctatagacatcctcgccttctaaagtaatatcccctgtgattttgcaatttttgaccaaatcattcatacggttaatacttttcaagagagtagactttccgcacccagaaggtccaataaaggctgtgatttctttttcttcaatgtctaaattaacatccttcagagcgtgaaattctccataatacaaatctaaattattaattactaatttactcactgttcgactcacttcctaatcgtttggctactagtccagatacaaaattgacaataataactaaaagcaataagatgaccgcagtcgcataagtttggtcaacatataagccctcacccgaaatagcatacatatgtactgctaaagtacgagatgaactaaataccgaatgtgctacttttgcaactgttccagctgtgaaaataagtgctgctgactcaccaatgatacgtcctaccgctaaaataataccagcaaaaataccagacatagcactaggtaatacgattttaaatatggttctcaatttaccagcaccaagcgcaaaggctccttctcgataagaatccggaacagatagtaaagcttcttcagttgtcctcataatcaaaggtaaaatcatgatgctcaaagtcagagaacccgatatcaaagataagcctaagtgtgtgtattttacaaaaaataatgcaccaaacaaaccataaataattgaaggtatccctgccaatgtctcggttgcaacacggataattttgagataaggattatcacgtctagcatattccgttagataaattgatccaccaataccaagtggaactgcaaataataaagttaaggcgatgataaagatagtgttaatgaaagctggtaatagtgaaacgttctgagtattataagtccatgcaaacaagccagtattcacatgaggaagccccttaactaaaatataaataacaacaaatgcaattgtagcaaaacttagaattgctcccaaatagacaatagcaaaaagaaagaaggaaaggggatctttttttaaagatgctaaatattgttttgacgttctttggttaatattttccatcttattcctctttctgtaatgctgaaaaactgatattaatcattaatataaagataaagagtaccacagctgtaccaattaaggcttgacgatgcaaaccagaagaatagcccatttccataacaatgttagtggttagagttctaacgcctgatgtcagcgattgaggcaagacagcttgattacccgctaccatgatgacagccattgtttcaccaatagcacgtccaattcccaaaacaaccgatgctaaaatgccacgtttagcagctggtaaaacagcaaagaagacacttcgttcatgagaggcaccaagggcaataccgccttcataatagctctctggaacagctcttaaagaagattctgaaatgctaacaattgttggtaaaatcataattcctagcaaaattgaagctgctaagactcccataccaaagccaccaatatattgccttatcatagggacaataacaacgagtccaaagaaaccataaacaactgaagggattcccgccattaaattgatagctgactttaaaggcttataaatattttctgggcagaaataagccataaaaacagcagtaaggatacctatcggtcctcctaaaagtaaagctcccgctgtaacatataaggaacctacaatcattggaaagatgccaaaaatattattactaggatgccagactttaccaaatataaaatttccccagccgattttcgtaatagctggaagaccactagagaagagaaagaggcaaattaaaatagctgatataacactgacgcaagccgtgatgaaaaacacagcttgcataagaccttcttttgtttgtttcattgtttactcttaccttactttgataagtcagaccaagacgttgtctttccagtaaaaatgtcttttacttgttttgttgatagatcattaactttatttttcttattaacaactactgcaataccatctgttgcaataacagtagctttgacccctttggatgactctgtcttatccaattcacgtgatgccatacctatatctgctgatccatcaattgcgcttgtaatcccagttgaagaatcactttgttgaatttcaacatctacttttgcatttactttatgataggcttctttaatcttttccataaccggcgttactgaacttgaacctgctataacaactttaccagatgacacttttgcttgatatgctttagcattgtcaagtggaatatagccatttttctcaacgactgcttgcccatctttgcttaagatataatcaataaaatcttttgttgcttctttttccttaccttcttttgttacaatattgaaaggacgagaaatcttatagcttcctgatttaatatcttttacagtcgcatttttgccatcaattttaagcactttaacgctactatttaatgaacctagtgaagaataaccaatagctgacgggtctttagagacagtggttagcataactgaagttgaattggtaacagttgctgcatcagaagtatggtctactttttcgccctttttattttttgactcgatcccaaataactctatgaaagctccacgagttccagacccttcctctctagaaacaatgttaattgtccctttagatgaagatgatgaatcatttgagcatcctgctaggatgccaattcccataagaccagataccgccaaaagagatagcattttgtgttttttcatgatgaactcctaaatattttttgatttgattttattatagttaagaaatatcaaatctctttgaggatttttgtaaaatcaatgtaaaattaaaaagagttggaaaattatccaaactccttttttctattatggtaattcagccagtaagtcggattgaaacagttgttacatcacataattggagtataactatcccattatagagttaacttacgaatgatgtcaatgattttttcagccacttcctcagcatttaaatgatttgtattaatatgaataacattggaaaatgtgtctaaataatgttttttagcaggcagcaggtgatgagtataccatttgaaaaaatgacgctgtctattaaaatcatttttttgacgttggtataggaccgtctcatctgcatctagaaaaataatataatcagcaaaacattcctttagcctatttacctctagtaacaaattagaaggtaaagtccaactataacccgccacctttggaaagtattgtgtataaaaagcaatttcctcagctccataatccattaacactatttcattatctctaacaagttcgtatctatctcgctcatgctgaataaatagttgttgaatttcacaataatcgtctaatttattgttatcaagctgatgtttattaatcttatcaactactggagaaatatcctcaaaactaatagcgattttggggtaaacattctcaatgattttcaaagctgtggttttccctacagccataccaccttgaatagcaataatcataataactccgctgagtaactaataacacttagagcatagagcggcgctgtttctgtgcgcatgatgcgtggccccaagcccaccttgatagctccaacctcttcaaaagctgcgatttcttttggagaaatgcccccttctggtccaaagatgaagaggagcttgtcacctgcttttacagtctgcaagttctgggctagcgctgacaattcaccctccttggcagactcttcataggcgataaaaatcttatcaaagcctgcaagctccgcttgaaaatcagccttcttctcaaataaacgaacctgaggaagacgattacgcttgctctgctccgctgcgcccagagcaatttttgccagcttatcttcttttttagctagtttcttgccgtcccacttgacgactgaccagtcagctgggaatccccagatagccgcagcacccaattctgttgccttttgcgtcacaaaatccaacttgtctcccttgggaaaacctgaggcaatggtcacttgaactggcatttcaacattgttgtctagctcttctagaatttggaagcgatgagcagagctgtccaccacctttgccagacgcttgatggcatcatcaaaaaccaagaccacttggtcatcttctgtcaatcgcatgacattgaacatgtgcttgatggtatccttgtcctcgatggtcacataggcacctgcttcgccatttacaaaatactgttgcattagccgccaatcactcctgaaatatcatctgtctttttgaaaacgcaggcattccactcaccttgaaccatgtgagtctcaaggaagaaaccagctttttcagcactctcacgcaccatgtcccacttctcagaaatgataccagacatgatgagatagccctcatccttgaccaaacggtaggcgtcgtctgtcagatggatcaaaatatccgccaaaatattggcaacaataacatctacctcttgctggacacctttgagcagatcaccagcagccacatgaatattttcagtgccagggttcatatcgatattttcctgagccacgcgcactgcaacatcatccaaatcataggcatagatgtccttggcacccaagagagagctagcaatagacaaaacgccagaaccagtccccacatcgataaccgtctcaccaccacgaagcacttgctccaaggcaaaaagactcatcttagtcgttgggtgagtcccagtcccaaaagccataccaggatccatcttgataatcttctcaccagccttagcctcgtagtccgtccatgacggcacgatggtcaaatcatgggtaatgcgagctggctcatagtacttcttccagttatcagcccagtcctcttcgaccaattcctgactgtcaaggttgacgctacccgtcgcaagaccaaagccttcaaaattagctaaacgatcagccaaatcagccttaaccgcctcaatatcaagcgtatcaggataataagcagtaatagcaatcatatcagactgctccacctcaggataaagctcaccgaaacgatcctcctgtccaaggtagtcagccgaatcgctaatggcaaccccctgactgccagtttcaatcaataaattcgagacagcttcctctgcctcacgattcacgtgaaccgttagttcattccatgtgttcatgtagtaactccttcattatttctacttaaatcaataaaatagttcaactgccatcgctgtgtcaccaaagctgttctatttaaatcgctacaccaaggagggtaaaatcgcatagccatctttccttgagagttagcagatgaaagaatacccttactcactgcaacctctttgggaatgatgaacaaacctttccacctaccatctttaatgacaataatcaaatcttccacttcatcttgttcataaaaaggaatatttttaccatttccatctttctgccaaaatactgtaaaataccccatcttgctagctgtcttatgagctaaacgacaccttttatagtttccatcgccttcaattcttatgaggataccttcatatttttcattccacttttcttctttaacttcaaaggaagaataccattccctaagtagctcaactatttctataactatccctcctttatcttcaaatcaatatgattaaccatacttttcaaaataatttattttttgcttgaccctgaccttaggttatcctttatactatgtaagtgagaggaggttattaccatgaaaacagttaaagaagtcagtatcttaagcggtgtaagtgtgcgcaccttgcatcactatgataaaatcggtttattcccacctaccgccctatccgaagcaggctatcgactttatgacgatgaagcattgattcgcctgcaagaaattttgctatttcgtgagttggaattccctctcaaagatatcaaatacctgcttgagcaagcaaaagaggaaaggcaagacttattagcccaacaaatcaaattgcttgaatggaaaagatcgcaccttgagcaggttatcacccatgcgaaacgattacaagaaaaaggagatgattatatgaatttcgatgtttataataaaacagaattagaacaattacaagctgaagcaaaagaaaagtggggacaaacagcagcctacaaagaatttgctcaaaaacatgcttcagatgactttgcacaaattagccaagaaatggcaaaaataatggtacaatttgggcaattaaagacacaaaatgtatctgatgaatctgttcaaatgtgtgtgaaacggctacaagactatatctctcagaatttttacacctgtaccaatgaaatccttgctggactaggacaaatgtatcaatcagatgaccggtttagtcaatcaattgacaaagctggtggagcaggaacaagtgaatttgtcagccaagctattgcttactattgccaataaactatcagaaaactagacaatcatctagttttctttttttattctatcttctttgtcatatagaccatatccattccttcttgctcaggttcggtatgggttgaatgataaccacatttttcataaaaactgaccattagtttttcttgcgcaatcgtacataaatcccactttgtaagcttaggataggttttctctaataaagccatcgctgctgagccgtagccctgcccttgatattggggaagaatagccgccgtaccaagccaagcacgcttctcctcgtctttgataaccaatctaagaaaaccaacaattgtctcatcaacaaggacaaaatgatagaaacaatctggtcgctccactagtttccatcgaatctgctcaacttcttccacatagggatcgtattgatcgtggtatttctcatagactgccttaaagctagctctctgaatggcaataatcttctctaaatcactagcttccgccttttgtaaagtaatcatcttccacctccaaataatctctcaacctctcctgcaactgaggaatgacctttttatggcttaaaaattcgtcaatggacatgagtttgtagtcttgtccttcatcgcctagaacaatgctatcgtactctttctgactgatatgtccaaccataaaaactgataatttatcaggcttcaacatacccctataagtcttgacccaatcaatatggtttcgagttaaggtcagacttaattcttcatcaacttcacgaaaaagacattccaaaggtgtttcattgtcctcacgaccaccgcctggtaagtcccaaaagcctgcatagggcaaatctggaaaatcatctcttaggctggtcaaaatctttccctcgcagaaaagagcgatctttgcacctgagaaatcaaataactcatcaaaaatatccatgcaataacctcaattctattcctaaagctccatattttctgatttgttcaggggcataataacgttccatatcctctggtctggctgtttctatatcatccaatgtatatccacattttagcaaatccatcaagtctaatatctcggataagggtaaaactctgtctctttcagttctgctctgccattttcaaaagcatccgtatcccaagaaagaccgaactcttcgatactgtcatcggtgaggaagtccatgaggtcgctcaacccttcagtggcaacctcgttgagagtctccgcaaaataagccagaaactcacgcgacaagcccttcttaggctcataggggatagtcaccagatagtcctcagcatcaaagcgagacttgacagggttgtaaaagagtacatagtcctcaaaaacgatgtcctcgctactcgtctccccctggtcgtccacggtttcaatagcagagctgttttgtgcttctaatataaaagtgacttctacagtatgatttttcttatcccaatccatggcaaagtcatactgtaaatgcttatccaattcttcttctagtaccgataaaaatccaaatttagccatcttatgtccttattttctatttattctttcttattataacatgaaatagaagaaaaacgttacagactcaggttaatcaaaaggtagttcctacttatttttatgttacaatagtctcaaagactagccgtttttgactgacttcatactatgttaaaagcgtcagccaagagaaaaactctatatagaaaatagaaaggatttgaatacgggactaattttctagaagaaaagatgaacttcctaatgtctgacgacacttcgtcgttccctatttctttacgaaaattttcggtaaaccgaaccgtccctttgtatcatcaattatgattatcagacctatgcaggactgcgaccgtgaggcagttctgaccttacaaaatactggctggactgctcttacctctcctgtctatgaccgcaagtggactgagagtgatttggagaagaatctggcaaatggcatgtccttctttgtcgctgaggtcgatgataagatcgctggcgtcttggactttggtccctactatcctttcccagctggcaagcatgttgccactttcggcattctcatcgctgaaccctaccaaggtcagggactgggtaaagctctcttgaaagctctgctaactgaggctaaagctcaaggttacatcaagattgccatgcatgtcatgggcaataacagcagagccatttccctctatcaaaaatacgggtttaccgaagaggctcgaatcactaaagcctttttcattgaaaatcattatgttgatgctttaattttcgcaaaagatttggagaataatcatggctgacaatcttgctctacgtatgcgtcctcgcaatattaatgaagttatcgggcagcaacatctcgttggtaatggcaaaattattgatcgaatggttgcagctaatatgttatcttccatgatcctatatggcccaccaggtattgggaagacttctattgcttctgctattgctggtactactaaatatgcctttcgtacttttaatgccactgttgatagtaaaaaacgtcttcaagaaattgcagaagaagctaaattttctggtggcttagttttattacttgacgagattcatagacttgacaagacaaaacaagattttcttttacctctacttgagaatggcaatattattatgattggagcaacaactgaaaatcctttcttttcagtaactcctgccattagaagtagggtacaaatttttgagttagaacctctttctaacgaggatattaaaaaagccattcagctagcaatttccgataaagaacggggatttccttttttagtgacaattgatgatgaggcgctagattttattgttaccgccacaaatggagacctacgatctgcttataattccttggatctagcagtcatgtctacttctcctaatgaagatggtagccgtcatattagtctagagacaatggaaaatagtctgcagtgtagttatattacaatggataaaaacggagatgggcattatgatatcctatcagccttacaaaaatcaattagaggttctgatgtcaatgccagcctgcactatgccgctcgtttagtagaagccggagatttacctagtttagcaagacgtttgaccattattgcttatgaagatatcggcttagctaaccccgaagcacaaatacatactgtgactgcattggaagctgcccaacgcattggttttccagaagctcgtattcttattgctaacattgttgtggatttagctctatcacctaaatcaaattcagcctatttggctatggatgcagctttagctgatttacgtcgttcaggaaatttacctattccacgtcacctaagagatggacattacagcggtagtaaaaccttgggcaatgcaagggattacaagtaccctcacgcctatcctgaaaaatgggttaaacaacaatacttaccagataaactagtaggacataattactttgaagccaatgaaactggtaaatacgaacgcgcacttggttcaaataaagagcgcattgataagctctcagactgattgctagttttaaaaatcgcaatcgatttcaaaaatcgataattttgcttgaaaattttataaaaagtggtatcataaagacatagaaacattgctgtggcatacgaatccacatctaagtgttgaccgactatttctttgtatttcgggaaacgaagtcatctctagtgcgcaagccgttaacacgcggaagccacttaaagaggtgcgagttacccacctgcttattttgtgcgggatcaatacaaaaagtggatcatcggtgccaatacagcttcctagcctccttagctcagttggtagagcagtagactcttaatctatgggtcacaggttcgagccctgtagggggcattaaactatacataaaaaagcctttgattaaaggcttttttgcttgtctaaagtggatttgtcccatcttttgtccccgaaaaattttttaggatgaaaattattttcttctgtattatttcgttgagacaatatacatataaatatcactttgtactaatttaaacttcacttttctcaaaaatgactttagcagatatcaaactgattaagataataccgatgactaagagagttggttgtaataaatctttgatgtcatattgaccacttaggatttggctttgtttctgaatcaacaacatgggattccattccttggtaactttgaaaaagccagagatgaaaaaggctacaatggtcatcagacaagctattaatacgcctgcagttttacgaaagattacagagtaaaaaagaatgagactcagcaataataatccaaagatccaggatgtaccgtaaacaataagtttatgctgaccatgattattaaaataataaagtgtataagcatactgggtaagtgatcctagtatatagctgatgctccaaataagtgtcatcatgataaattttgctaagataatggcttttttgcttagtcctttggtaataagattaataagtgtacctctggtaaattcttgagtcaaactaccactaaaaagaaaaactaatagaatcaatcctagctgattaatatttttaaaatattgactataagaatcaaggtaggttgggtcaggaatagcttcttgcagtttcttaggcaaaatccctgccatgatttctggcatcagtaatgctgtgagtggtcctaatattccgaaaatgattgaaataaggagaagggcaagagctttatgactacggctattttctagccactcttttttgagcatggggatcaatccggtcatttaatcacctccaaatagaagtcttccaggctatcttccagtaattcaatgaagtatggcgtgatttcttgctcaactaaatacctgtaaaaacttgctaatgcttgttcacgattgtttgcctcactcaattccaaatgtaccttataatattgatctttttgatttaaaggaaatcgcagagctaatttttgtgcttcattgtctgagacttttattaaaaggttcagttgattcacactggctgacgctttgtctcttagatcttctagattatggatacctgattttgttagaattagaacttgatcacagactttttccacatctgataagatgtgtgtcgagaaaatgactgtcttttgaccacgtagttgagaaataatggagaggatttcttgtcgtccttgagggtctaaggctgatgttggttcatcacaaatcagaattttaggattgtgaatcagtgcttgggctagacctaagcgttgtttcatacctcgagaataggtgctaatgcgttgctgattatcggctaagccgacctgttctagcagatcagcaattggtaaactggttttgttttgagctaagccagcgcaaagttgtaagtattcttgtgccgtcatatagtcataaaactccggaacgtcaggcaaataaccaataacttgattactttttgtctgcccaaaagtcactgggtttcccattactgaaatggtaccagagtctactttcaataaacctaaaatcatcttaatggtggtggttttaccggccccgtttggaccaacaaagccataaatcttattttcttctagctctaaggaaacctgatttaaaatgatttgatccccaaaggatttggacagattttgtaaagaaatggctgtcatgcatttttcccttctaagctaagaaaagcaataggtccaaggagattaacaaaaaggataattagaacccaaactggtttagaaaggtagtttgtctttgttatttttcgtaattttaagagtgcaatgatgataaggataacctgtaagaggataagagggataaagaaaggtaaaaattggctagggatgttagtgttcatctgaaatctccttttcgagtttttttaaagcagcaagctgagcttggaaggacttttcttgctgtaagtattgaaactgtggactatgaaacagggcaattaccctttggattaagatttgagaattggttggtggctgaattcctgttggtaactgttggagccaaggatcgatggcatcaaaaaagctgtcgccatgcagttcaaattgttttaataggtttcgggtagcctctgccaattgatttaagtaactaattgctttttggggctgactttcagcgaaataacaggccaaactgtagtaagaggaaatggctgtattaggatgaagctttttgaggtcaaatgtggccataagattttccagtcgttccaaaatgaattcttgccgttcgggacattcaaaagccgttaggcttaacagatattggcaaatcagcagaatttgctggtaaatttcaacttgtaaaacttgttttgcttgctctgtttcccccttagcagcgaagctattggccaaaaataactcctcaccaagtttataaggacgattctgataaagtgcgataatatcatcgtattttttttgttgaaaaagtattactacttttaacatgatggcagactgaagttcagattcaacagttgttttgctgataatccgattgattagttctaatgaccaagggttactatcaatctgagctggattgctcaaaaccagttggacgaggagtaaaagggttttgttatcattgatataatgttttgctaagtcttgaatgttatgaaagaattcagtcccattttgttggtcaatttgtcctcgcaattgttcaaaaagatgccctctttcagagtcagttagtgttttttgaaaacctaccaactcatctaaagtcatatcaaatagttttgccattagaatcaagtaatcgatatcaggttttgcctgattgttttcccatttggaaattgtagccttggttaaatgcaaatagtcactcagtttttcttgagtcataccaagacgtgtgcgttcaaataaaatagtatcaccaatcattatgaacctcctttatttgttattataatgtttcctaaatgaaaaataaagttcctatttagaaacaatcctagtaagaagattctgtttaagaaataaaatttctttcatgtcacagtacagtacatcagtcaattaaaataatttatttccgtcctttttaaactgtagggaatcatatgacacattaaaaatttttgattaaaggcttttcgcctatctaaagtagatttgttccatcatttatccccgaaataaatttgaaatattgttatattgtactcatctcaatcacgaacaatataattgaaaaatggctatttttgcttcttttaattagtagtatgatataattttgtaagatattttgggaggttaaattggatataacagcttatcaaaaatgggttagtgaattttacaaaaaaagaaattggtaccagtataattcgtttataagaagtaattttttatgcgaagaggttggggaattagcgcaagctattcgaaaatatgaaattggtcgtgatagaccagatgaaatcgagaaatcaaacaacgaaaatttaaacgatatcaaagaagagcttggggatgtattggataatatttttattctcgcagatcaatataacatttccttagaagaaattattgaggcacataaaaacaaattagaaaagagatttgaagaatgaaaataactgtcttttgcggtgcaagcaacgggaataacccaatctacagtcagaaaatagtagaacttggtgaatggatgattaaaaataatcatgatttagtttatggtggcggaaaagttggcttaatgggagtaattgctgatactgttattaataatggtggccaagcaattggcgttatacctacatttttaaaagatagagagatcgcccacactaatttatcaaagcttattgttgtcgaaaatatgccacaacgaaaagggaaaatgatgtctcttggagaagcatatattgcattacctggtggaccaggaactttagaggaaatttcagaggtaatctcttggtctcgaattggtcaaaatgatagtccatgcattctttataatatcaatggttatttcaatcacctagaaagtatgtttgatcatatggtctctgaaggcttcctgagtcaaaatgatagaaataacgtactattctcagacgatatcattgaaattgaaaagtttattaaagattatcaatcacctacaattcgtaagtatagcaattaaataaagaaaatagccatttatatttggctattttctttattctagttaccatgttattctaacttttcaattttattcgaaaataaagaatcatactcagaaatatcttcatctacaaaaaattcttcaatagcttctttattattgatatttagttttttacctatacttttttgttctaccaaatttttaaattcttcatctatcatctattagcacctcgttattaaactatcaccatagttgttttatctcattgtactcttcttgaattttttcttcaagagtatgaccatagacttcaattagcatagaaatatctttatggccaagaattttcgcaataattcctagatcatatcctctatgccataggaagcttccataggtgtgtctagcaccttttgttgtaatgatgggttctatattcaactcttgaacgatgcctcttaaaaccttatttgtaccgtttgtactcggtacactattaggataaccaaaatgttgaaataccatattgtttgtattttgtaatccaagctctttatttgattgattttgttcaatcttaagatttttcaagatttctagacactcattatcaactggaacaattctgattgaggttttatttttaggtggaacaaactgacttgtttcagagttaaatcttctatatgttttaaagattcccttatcaaaatcaatatcttcccaagttaaagcaattaattctccgtatctcatacctgtttttaataaaaaatagataatatatggtactaccgatttcttataattgaatttatcttttacagcattaatgagatccaaataagctttttcactatgaaggtatttactatctgcatcctgactttttactgttgagaataattctacattttgagtaaaatcttctatcataaccttatcagcaatagccatttgcaaactctgtttcacgccagtatttaaccggcctaagaaattgcgactaactcgttgtccatagttattcataattcgttgatattcactaggtctgatttgagaaatgggtttatcaccaaatagcttttcaagcgttaccttccgactaagatatttctttttagtcacatcacttctattactaggcatgatttttaaatctagccattcttgataaagttctggtaatgaaatattttttgtgattatgctaccagttctcaatttttggagaataggctctgcttctgcctctgctagtttctttgttttaaagccactattataagcaactgttttaccttcctctcggatttcataagcccataaattctggtttcctctccttctatatcttgcatttgccatatgttatacctcaagtccaatcacttctgaaactgcacttctagggacaaccataagacgtttacgatcatagaaagtataaccacgttccaccattaaatttctagcttgatggataatatggtttgctgttgaaggacaatagcccatttcaattaagtctttattagtcattacattatttgtcattgtatttttttcctttcgtgttataatttatctagaatattttttctatgtcgacttctttcacaagtcggctttttttatgccccaatattcagagctttgctgttcacgtacatattgttcaatctccttttcgtcattatcagtaaacttttcaactcccctgcgaagtaagtcttgtaaaaagacctctgcctgatcgataccgtaggcttcgtattttgccatataaacctttgcaattgtctttgacacttgtttatcagtccacgcttcagactgccttaatgttggtttttctctcacaatactcagtcgtgttttctcctctgtattgatatagttttgccaccatcttacagattctcttcttcgtttatttttatctcttgcttttggagaaacaaaacggtaatgtccattgatagcctcaaaatatatagaggcgagagggcgcatatcatttagctgatgagcaattagattagccttctcttgccaacatcttagctcagctcgaacccatgaattaatgtcaatatccgtctgtaattttccattttgctccattaatttattataaacacaccattgttggtttcctcttgcaccaaagacaactgtttcaccaacgagttcacctgaatcaataacgaatttttcatggtactctgcatgtctcgcagttgttatacataagccttttttactatactcataaagcctttgaacatttaacgactcatcaaaaatatcattcgcaatatctaatctggtaaagttcgaattattatcaattagtctctttactaaactagtccaattattatcattaccttctataaattcctcatactgccgacagccttgtccttttagttcaacatgaactcccatgctactattaggatctaagttaaagtaaacttttatctctgaacaagcatagtgacgttgatacttattgactccccattcgttcaaagtaaaattggttaaaggtattaataaaagtttctctattacatactctggagtgacatcttttactgtaacagcgaaataatctatcttaacgctgttaaacaatcttattcacctataattttgatatctgaggtagtcagttttattccaccccaaccttttcgatttatattccatgctagacgaacttggggattaatcaattcaatcgttttttcaataagcccatcattgcttgcaattttactaatcttatcaagattatccaagatttctaatggaattgtttttaagtcgtcggcagacattcccatttcttttaagactttaactttttccgcatcttgtacttggcaagttatttttgaaatttcatcagtttgaactgattcaccattgatattattatatttattgttaatacgtgcggataagataattacttttttgggaatttcaaattgagatttttccaagtttaagtcacctagacttactgtatctgttaatttaattgttgccatttttctacctcattttcataataaattatttgcatcttttcttcctgtacacgaaagttactatcagctctactctctcaatggatttcagcatttaatggtattaaactaccttcaccccttatgtatcaagggtttgagcactatttcatgtacgtgtgtaccccctattagtagcggggtaattattttcatataaatttcaaaagaattttcacagattattaacttatcaaacttaggtttgtcctcgagcactctgcttttatctcccgagtcgctatggcttccagcacctcgctcctcgttagataatcgattgctctcagaaacctcgcttaagtttgttaaatatacctgaatccttctcattttctaaaatgtttaatcgctctgtcagctccttaacctgtttctgtaaagactgattatttttttttaactgaaacatactatcttctgcttcaaataagaatttatagaaatcctctgatagcattttcaattcattttttatatctcgttcggactgagcttttgagtcgccccagacttctttaatagagtcatctaaattctttgtcttatccactaaatgagataagacaataaatttagtaacttctacttctgtaaaatcaaagaaaacttgtgtgctacgcttagaaactcttctcctgacttttttaaatttgtatccagataacatttcaattcgtaaacgccatttcttgattgtactaaccgacttgtttgtttttaaagcaatttctttataatctatagcattaccacctatataatatatttataccttattaataagatataaatatattatattcttatccaatcaaaaaatcaagataaaacttgcaaaaaagttatatcctgataaaataaattatatacaatatacgtgagggaaaattatgacatatataattcaaaatttcggtccaaatttgactagattacgaaaagaacgtggaatcagtcaagttgaactttccaatcaactccaaattggtaagcagtcaatttctgattatgaaaagcaaaaggcgtttcctacatttgctaatctagataaaattgcagaatattttcgtgcaacccccactcaactattcggaaccataaaagaaattgagctagagaatagtgtcttagaaacagatacttatacttcaaaagcagatcatattcttaagtctgttaaagaattttatgaactaactaattatcttaatgattttaatagcccagaattttacaccagcgaaacaattaataatttgtatcatcttattactccaaaaccaatattggatccagaaactgatgaacaacttatgagatttattccaactggaaaactagtacgagcagaagatattagcggaaatcccgaagactatgaattggcatttaaaccaagtccacttactcaaactttaagtagaatagatgaaataaatgaactttatgaaaaagtaaggtttgttgaagcttttaaacataataatgaaactaattctagataataatatatacaaataacagaaaacctaaaacgatatataatatttttctctttacaatagtaaaaatatactgtaaaatggacgtaagataaaaacagttattctcatagcgcttgtttatcgtcgtccaaaaaaagtccctcattgcatagcagtgttgggacttttttatttagtaatgcaataaatcaaaagctttcaaaaatcttcgtctagacgtttcaaaaattccttcatcaattattttttcaactagcaaaaataattcttcttttggaaaatttttaatatgagttgctataaaattatatctaacattgtccggtacgtcagcttcaagtatgccaacaatttccgtttgtctttctaacgtttttgagtgtagcaatgggacgccaatactactagtaaagtcatctaatgatagctcttcttcctttgataatctttttttaatgttttcagtgtacttatttgaatctttagaaatatattctgacattgcaaacatatatttttttattggaagatgacttgctactggttgggttgcaataaatcgaataacaatttcctgaggaattgtttctttatctagaaaatatgatctaacatactctttaaaatctggaaacttatatatgtatctttcatccccaaaggcaacaactatatttttcgaacgaatttcatcctctgttaggtttgctaaatcttcataactagtcaagacagtttttaaatctttgctctctcctttaacttctattatttttcgaaatacattttcatatttcgctatttccgaaggtaaaaatccttgatttatcttagagattaatctataaatattggtaaaattatcagtttttaaacacgaatagtaaacgcttaagtcaggtaagcttgagaccactgtttcaatagattcagaatctggtagatattcaactacacctattttttgagctgattccgatatatcaaaaggactattttctgcaaaatctgtcaataattttctaatattttcatcagttaatgaatagcccaaaaataggattggtgactccaccaaatttgaaagtatttttgcattaattaatgctgactttgttacattcttttcatagtcttcctttgttatagttattgttgaagcatcatctacagttccatgtatcttatacaattcaccataatcagaagactttaaaaatagccccttatttcctacattaatcttcacactgacatttattgtttttaaacactcttcaataaaattatcgtaattagttgtaattattattcttgctttagataacatttgagaaaattgttttatctcctcaattttctcttcccgaatttttaagtttgagaatctatttgctactaactgtttaaatggagatatatttaattcataagctgtctttaagtctaaattatcaacttgaatattaccatttataaaagcttttgacacttctttttctaataatgaagctagattagtataaatatcaaaatcattgttttcaaatctttctcttaattcgaaggcttttgcataatatgattcttcatcaaacaactctagccatatatcttttaatagtttctcccatgtcggtgcattctcaaaatatctttgagtaatacctgaaccaacaaatataattgggaattgattgttttcactgatttgttctataaaattcactagttcttgtcctcatcttttattaattattagcttgttcaactgttaatcttattataacatcttggataccattttattaatttttattattaaaccatatactctaaaatataattgtcccctttttgtcccacattattttttctaacaataatacttcaaaaatttagctaaataaaaagcctttaaaatcagcattcttgattattattatcacaaaaaattgtaagaaatcgttgtagggggcattaataatattgtcaaaaaccttgattttaaaggtttttttctttgtttcagcagatttgttctagaagatattctttaaaaattagctttaagatactaaacttctgaccgtttcatattccttatttattacttctgtcaagacgtgaccataagtttcaagtaactgtgtaatatccttatgacccattaatcttgcaactacccaaatatctacaccttttgctaataagtaacttccataagtatgccttgcacctgttgcagtcatttttgaattaatatttaatatttttaaaacatttttaagacttttatttatcgcactatttgtcgaaacaccatatctatagtcataaaatatttgattattcatgtttacaatttttaagtttttcaacataacttgctgatcatccttcaaatctcttaagattaatgctaaagattgactaataggaatagtgcggatagaagtttttgttttaggtggactaaaagttcccttatcgccactaaatcttcgatacgtcttaatttctagatcttcaaaattaacatcatcccaagttaatgctaaagcttcacccactcgtaaacctgttttaaatagcaccagtaataaataataaacgatactatttgaataatccaaattgttttctaaataagatatcactttcttgtaatcaaaaatactatgtagatatttatcatctgcatccttaacaaatttcctaccagctatgacaactccatcagtaaaatcagataataagacaccatctcttttagcaaattggatagctttttttatatctgaatttaaccttctaacatggtttttagtgtatttttcagcgtacgtatttaatttcctctgatacgcactatgctttattttatttactttctgatttccaaaaagtttacgaataacagaacctcttgtaaaatatttgttctttgtagtctctgctagattgctaggctttataattaaactgtaccattcaaaccacaaatcatacaatgttatatcagaagatatagaatttactaataacttttgttgctctatcctcatagcttcattcatagcttcacgctttgtcttaaaacctgaaccagaagcaactaactcacttttttcattgaatattctataatcccataatttctttttacctctttgtctatatgttgccattttactcctttcttagacatcaaggaatttatcctcaatattatatcatttaactatttaataaaatagaaccaaaattatcttcaaaatattttctagcttttgttgctaatattttatatcgactacctttacctttcggataaacaataaaaccatttggattaattgataaatctacttctttttttatatctggatttaacaaaatatcattaatcaattttgaccttccaattcccaataactcttgcaagttatcaatatcccaccacttgccttgttcattatcacttaataaatttaaatattcttcttttgaaataataacaacatcatctggtacaggaacactcacattaaaaacctgttgcatactcatcctccttataacttgcttaatccgaacgttatttgttccaggtaattaggttttccactttaaaaccgaactatttttcagttgcagttttaatttaaaatccatatcccccgaacattattctttaataaaaaaacaaacaaaaaaagccatgaaattaatcacaactttatttctatcaacttcttatccttcaagatcatttaatattcttcttaaagtactttttatttcttctgcttcgctataaccgacatcctcaaacctagataattccctttcaaaacttgaaattgatttacgtaattttgatatttcatcatttttaggttgatttgataaatcgactattttttcctctaaagaattaacttttaagcctaacatttgattttctctgcttacttcaccaaacttcaaaattaattcattagcaaaagccattttttcaataagtttatctccatttttcacatgattataaacttcttcctttgactttttctcaataagcatttcatcacggatatatttagtatcttctttaacatatgagtttttttgaactaattcttgtttattcttttcaatattgtttgataaattgctttgtatcagaacatatttatcatattgatttgtcgaaattttggaaaattcgtctaccaatttctcttgaccttcttctaaaagctcaagttctcgttgaatagctttattatccctagagtttgaaatcaaaactcccacatttgtaaaaataattcctacaacaccacctaaagtagcccaatccattactgaataatcccctatcattttttctcctattctatcacattttattccaatctgtattatttaattaaaaaagccatgaaattaatcatggcattatcttatttttcacttttctttttgaaaaaggttaaatacttttttatattatctttaaaaccaatccaaactgctccagcaattaacaagagacctactattgtaaagatagtcttaccctcaccagtttttggcaatacttctatttttccatctgattttttaattgctacagtaccgtctttttgaacatttccaccaacttcagcagcatcttttaattgcgtacctgatggtgtctgtactaaaactttaccatcttgagtaccaatgacttgatctcctgttacagttgtaataggttgattaatagttggctttgttactggttttatagatgattctgaatgatcactaggtttattcgtagaaggtttgtcaataccggcatttggtttagtaccattatcagtaattccatctactggatttgttgtacttgatgatggagtacttgaatctgtcgtacctgttgtttgatctgtacttggtgttggtgcacttggttctgtggtatctgttattggatctgtacttggtgttggcgcacttggttctgtggtatctgttattggatctgtacttggtgttggcgcacttggttctgtggtatctgttactggatttatacttgatggtggtggcattatagaatcagatacacctgcatctacccctgatagcattatagtatcacctccactaattacaacatctgcacttgctgataaattaccagccattaaaaatagtcctgaaacagtaattaaacttaaaacttttacttttgacataaattttccttctttcttaaaatactacatttacaggtgtaccatgtacactcgcaatctcaaattggtctgtacctaatacataattaccagctaaacttaatttgtctcttttatctgttactaaattaatagtaaactgataaacattactcgcatctgactcatatacttgtaaactttccaaatcaaaatgataaccagccatcaacatggtttttacagtttgggcaactgtaggatttgtaatggataatttattttgataatcacccttaatatctgattgtgttgggatttttacaaggtaatcaataggtacagttatagatcttttaaccttctccttttccttatcagatacttgacgatcactagcttccaaagtagattttgcttctttagttgaatcataagacttaaccttatgtttcggttcaactcgttcaacttttgtatgattaccacttgttttaatcactggattatctttttgaataactttataaactataaaagccatcactaacaccattaaaaataaaactatttttctacgtttcattaactacctaccgttttcactttatcagacaatttataaccagctttagagggattataaaaactataatgctctttttttaattctaaagtagaaacataacgataattccatgaatatggtccaaatcctctattatctccagaataagttgaataattttgctctactattaacatatcgccattttcaaatacatgactaaccactccagtatgcccagcactagaagtacctgaacttgaaaaaacagctccagaagatggagtattttcagagcgtccaccgaatgcagatacccaattagaaacaaccatattaccatttcccattctttgcgttggatgcattccgcctttaagccataaaccatacatcaaacttgctgaaagatctgtacattgaccaccagtagaagctatcgcattccatccactagacgttcgataaaataaaccaactgacttaggatctattgcatactttttcaaatcacttggtaattgatctggtttccatgcattataagaagtgtatttaactttccctgacttatctttaccaaataagccctgtaccgcattactagctgaatcacaaagagataaaactgtagaatcagaaattatatcgctcttaccagacgaggacgtttttgaaccaccaccaaaacttttagaaaatttttctgcatcaaatttatattttgaaccattaaatatttcataggctttttgcccatccgcagtcttttgagctttattaatatatgcagtatttcctcgttcgtaagcattccaaactaaagtggcctgcttgggatcagtcatctgtgccatctcttcaaaagaatgatttccacctgataaatccattgctttattccagtctcctgatttaatggatttcataacaaaggcattcatggcatctgcatcttcccatttgggatcgcctaatggggcatactttgtgaaaggtgtgatttgataaataccacctccagcttcagtcgtatagtaagataacccagtaggtctcacattaaaggcaattgaatttgtttttaaatcattaccataatgcccttctgctcgacctatcatagcaaatccaccttctgaattaacccaaccaacaatccctgatgcactcgcaccagataagcctttacttacccaagcattgaataccttctctgctgtttgatttgcaactgttcccttttttgtccaatcactattggaagcattctcacttgaggtttcaacttgtgaagatacatctggtgtaatttgacaatcttgttgagaacttgacgaagcagtcaacaataaaaccaataaaaaaggaaatacaatcagtattcccaaacagcctaattttttcttatgttttactttagttccctcctttcaaacaaaataaaaaagctccaacaaaaattgatactttaaaccactatgaaatatgatataataatgaagcagaaaagttaagacggtggctcttatttctgaaaggtaggtggtcccatgggcaattcatcaaaatccaacagaaaggaggagctagatttgtctacctttgaggtcttaacactcatgtttatagcaggtaacttcgttatcgctctcgtgaagttagtccttgaactggtaaaatcgacaaaaaaataaccgtctcaactttggcgagttaacggttattttttaacggttattttctgccaccgtcttaaacggttctgctaagcagttgttagaagcaactgctttttatttacaattatattatacataatctaaaaaatagtgtcaattaatatatagtttactaaacctctcaatgtcataaaactccttgtactacttaccttctctcagcttttctagttcttccaaaacttttgactgtcgttcaagattatgttgctttctaacttccttagttttactggcattaaatcccttttcaaaagcatttttaccatgattttttgtcatggatacatcactattaaattgacttaattcaccctctagcttattaagctttcgctgttttaatggtgaagtatagttatttgaatgattttctatatcatttgttatcatatcctgatttgttaatgaagtatctccatctccttcttgaaacgtgtgattatccgacttaacattttttaaaatttcctctgttgaattaccttctgatataaacgatagctcataagaagattcctttcccaattgttcaatccttttacttgcttctttaggtaactctgattgatattcaccttcattagtcagctcagcctctttagaaataacagtatcatccgcattagcttcatcatacttatcagcatcattagttttagactgaccatcatctaaattagcttgttgtctttctttgaaagcattccaattatcttgtgcattcatcattgtaccaacaccatagccagctcccatcatggcaaggcttgacatatcgtgtgccctctcataaatggattttggcgtaattcctagattttctgctttttcattaattttatctacagactgattaatgacttgagaagctctagaccctataatcagtcttaagaaagtttctttatatttccaaattccccaaaacacacaaccttggacgaaaactgttattagcaacataaacagtattgcctgacctttaaaattactaccactaagcagggaaccatctgtaaattttttcttaacaaaggtggctattaaagtttgagtatagaagactatcaaggttaaaaaaccagctaaggcaggaaaggaaacagccccaaacatgactttcaaaacattgaaaatgatatcttgcattctaggcaaaaatgaaactaataaagctaatggaaaaataaacattaatataatcactaaaacatctgccataaaagcaattaactgaatgagtattaatggaactgcgagtataaccgcttcaaaaatctttaagataacatagcctgattttatccaaagataatcatttactgcagaaagccatctatttttttcctccccttcggttgccttatctcccaaattatcagtataattcaatatatccttttgttttggagtgataaatttacctgatttatcgtacttacctaaaacttgttcgttatcaaacttttcttctttacctgtttgattattgtgaaacttaccatttaactgaccagtattgacaaacaaataagccgtataagaagttttcatcacataattatcagctactgatgatttttgtgtgatctttgttttaccacctgatggattatccagtgataaattagttaccgcatctgaaaacgaaccagctagttgatgaacggtatctaaaatataaataccacctgatgttgattgaatcgtaccaaagtaacccatacctaaaatgataaccacgaacaagtggatcaaacgtttagaaaaatctccttttgaaaaaagatatgaaataaatattgaaaaagctgaaatcgcaaccaataaataaagcaaggagcttgtataagacccattacctgatagattttcccataatttttgagacgaatgataaactgtttgtttataggtatcatacaaactgaaattttcaaaaaagcgtagaataacagaaaataaaccaacaatcaagttaagtaggaaaaagggaaaattaacaaaaacatctaacaaaatgctttgagctccagtctcagctccgtgagttatctccatataagcctttaacgcaaatatatccacatcttttaccttcgcaaaggtcgaagcaatcaaaccatcatctattttgtccatctgattacctcccttctacgaagcatatttattttcaaggtgacttgatactgttttcttcataggttttaacaatggatcaatatctggatgaatgttatgtatcgaaatcatattcaagttaccgtaaacatcataataaagacattgacctgaaatcatattatcaatccattctagattcttaggtgttacttctaaaccaacatgacttaaaatatcttcacgttccgatttttcataaaatgaaaaaattgtcccaaagccggtcgtatcatcatcgttttctgcatcatgaaccgattgagatactagcatcaacacattatacttagagcgaccaacacgacgcatagacttgataacagccttaccttctgaggattgcataagtacccatgcttcatcaaaaatttcaactgtttcatcatcactacgctcaccaaaatgcttacaaaacgcacctaaagcaaacattaaagcaatcgaattactttcatgatcagatatatgatctgaaccgtccttaggcaatgataaatccgcaacttctaaaactgtcacacgttcttcgtaagaaagaccagcaacatcaccatctgaaaatgccaactctaaaatagaattctgaataatagctttaaaataacgaccaactgactgaacttcatcactttcagaatcaataagaacttcaataacctgattaaaaccaacgacttcaccagcttcacgttttgcaatgacttgactaattgcttctgttaaagctgttgtttgatctaatttaatctctgtagcgttttttaacaaataaagcaacatatttttagccgttgaggaagcaccttccttatcaagaataacaataggatctaatacaccatgattttctttgacagaactatcaagagtgacaaaattcgtttcctcaatttgcttcttacgtagaggaaacttacgtgcatactctggatcagaaacaacttttaaatagtgttgccgtagttctcgtttagggtcaacataaaggacacgaacattttgttgagcagtatgtaaaaagatcatctgtgctaagtatgatttcccttgacctgtcgccccagttataatcacgtgaggatttttagtaaccttaccagcaacatcttctttattcgcgactgtcgcattaaataagacaagatttttagatcccataatagcttcgtcaatagaatcccaagcagttaaacgattatctactcgtccaatataccaaccaatcctgttacctgattgggtatttgtaaaaagcatcaactccgaaaaacctcgagcagttactaaatgattccacttacgagttgttttttgtaaatcttgaccataaagtaacgcttgaaataaatatggtgtatcatgactggcttcataaacattgactttcatatcatcaaagtaacttaaaatggcatatctacgttgttttagttgatttaaactagaaccagcaactaccaaataacaaccatactctatgatttcttccttatttccaacttttttcataagatccttaagcgaatatgctcccatcaagatatcatcttgttgaaccgtatttgtgttataagcttctttcatgatttgatcatagcgtgtatttgagcgacccatagtgccacccaattttgtcttatctataaattccgctttaaatcttaattcaaccggaaaactcattctttgaactagttcaccaagatgaaagccattaaatatggtagagaaccgacctactggaagaacggatacaaatgaactcccataagcactctccaattttaaaaaaccaccttctagtgatttaatcaacgtatctgtcacatttaacatattccgattagctataacctcacttttagtatggggaacatatcttaaaaattgcatccgttgataataaaataaatcaacatccgttaatcttttggctttcagggtagacaataaactatagacaagtaattcttcttctgaatgttctttataccaatcttcatctacttctacctcataaccagctaaagaagcgaagtttgatgcgatagattcaaactgattataaataaattcttttatattagcattgtattgccctttaccaagatcaactccaattaaccaatcaaactgatacggtatctccatttcatgtgttaacgtatcaactgtaaaatcgagtgtttctaaccctaattctttaacatcatctgctagatccgcttcaaaatccgacattttttcaccaagaagataatcttttggtattagacttcctgcgaaactaaaatcctagttcacggttgatcattccagcaatcaaattcattcgtaatccaaaccgtttgcgtcgatttcgataggttgttgaaaatattttaaacgtttttactttggcaaaaatattctcaaccttgattctctctttggatagcgtatggttataggttttatcttcaagagttagtggcttaagtttgcttgatttcctcggagtttgcgcttgtgaatacatcttcatgatcccttgataaccactgtctgccaagattttagcagcttgtccgatgtttctgcgactcattttgaacaacttcatatcgtggcaatagttcactgcaatatccaaagaaacaattctcccttggcttgtgacaatcgcctgagccttcatagcatgacatttctttttaccagaataattcgctagttgatttttttaggacgattgatttttacctctgttgcatccacaatcaccgtatcctcagcactaagatgagtttttgaaatcgtaaaaccactttgaataagagttgattcaacccattgacttcgacggattaagttgctttcgtgaatgccaaaatcagccgcaatttgttcataagtgcggtattctcgcatgtattgaagagtagccatgaggagatcttctaagcttaacttaggggttcggccaccttttgcgtgtttacgttgataagctgtttttaacacagctaacatctcttcaaaagtagtgcgctgaacaccaacaaggcgcttaaatcgtacatcagttaattgtttgcttgcttcataattcatagaactattgtaccatattttgtttcgcaggaagtctattaatgaaatatcaaaatttttatatttagctaattttttgataacctgtgctactttcgttttgtgactatctttcttatcactatctgtaatagtgattggggtatttggaatacgatagtatgcgacaacaactttatcttttcgtaaagctaaattctgatgtattctatcaatcggatattccaatttttttaccatctgatctcctttcttagtctttatattttcgttttctcaaaaactatttcttcttcaatatcaacacgttctccttgatagataccttttttatttaacccaaaatctttgagataaaccagataatcccacaaaaagatatgcatcttttttccttgcggttcatattctacataaaatttcgctaacttgcttggaacaaaccaatacaagagcattgaaacggaatgcgttaaagcatttaacacctgcattaatggagaacataccgtcagcatcaacattaagatgataaagaaaacaataaaaaatgataactgcataggtgtagaaaaataccaaatcactttgccttttgccgttttaacttcctgaatccagtaaggagcattcaagcccctgctgtaatcaaaatatttttcttcttccataacttataacttataaccccgtctcaacaccaaaccagcgaagcattccacccaaaaaagatagaatctgttgacctttaagcattgatacaataatcgcataaatagctaaggttgagaaaacttttaaccaattagcttctttccaattcttaataattataaagacagcaattacactaatgaggtaaatcccatcaccttgaaaaaattgctttagtcctgaaacgttgggaccacctgctaaaataacactattcacttttactaaattcattttttccctctcttacacctctatttaaaataatgatacatctcttcaacataccaaccattgtctgctttaaataaatataatgtaaagttttctgatcgtgtgccacctgttacaagatcttcaaaagttactgataattgcacgacttgatgctttttttcttgataataaatcgcattattaagatctagctcactaactttaaatcctttccccatcagttctggagttttcattaacagtttcaagtctgtcttgttaattaaggcatatttattaaagaaaactggtaaaaacttttgaatagaacttacttgttctttcgatagttccttgacttgatctaatgttttcttctcaaatgctttagatttacctaaatacaaatcttctgccacagtataaggttgactaacgattgcaagcaatcctctttgcatctgaaaaggaacagccaagttcatctgatatgattttttatcaacttcataaccaatacgcatcaaagctatatagtaatctttttctttttcaacacttattaaacgttgtgtctgcaaagtcctagactttctaacatcatctgtcatactggcagttgagaaagaataataattttctaattctgtttttctttgatctgcagtatcttgtgaatagttgatatagtagtagacaaaattattcatgtaatactgaattctagatatatctaatgaatcatcagtcttcttatgttttgactttttttctacagcaataactgtttcttttaaatgttgtacctgattagataagccaattgccctcaatgatccaaaaaatcctacaataaataacaaacctaagataccatagacaataaaattggctgtcctttgctttacttcttttgtcttaggctgtttacctccctcttctttctttgtatatctcaatagaaacttttttattttttgtatatcaatcatttaacccctttctataaaataaaaaagcagtcactttttttagcgactacttctacttataatgatctctaaaagataaaaaatagatttctccatcttctatcatataaatcaacctatgttcttctgtaattcttcgagaccaagcccctgaataatggtattttaaaggttctggttttccaatgccttcaaatgggtctcttttaatatcttctatcaaacgattaattcgtttcaagatttttttatcttcctgttgccaagaaacataatctttccatgcttcttcagtaaaattaaacatcttctacctcaattaaaccatgtttagtgacttgcttctctttaacttgtgatataccattaataaccttatgtgatagataatcattttccatcaaacgaatcgtttcttgtaaactttcccagctatcttgagataaaaccactatattttcatcaggatttttattaactacaatcaaaggctcaaattcatcattgaccttcttcatataatcttttaaattatttctaaaatgtgaataaacaatagcctccatattaatcacctcaactttactagatatgttgttattatatcatttgacaacatgttgtacaagttttggttttgataatcactaaataaataacttacaaatgataacaatacataaattatcgttaagcttccaattacctcctcattctgtttttaacacgtaaaaaccttttgaggtgtttaatactattccttcttcaatataagcatttaaagcatttacccaagttactgaccgttgccaaaaatcaattaaagaatcaaattcaactttccttaagatatatttcattactttattttcattatttgacaaaaatatataatattttgtcactattgaatgaactgataaaccttttttcaaaagatattgaacaatatagtcatcaccatcataaagtccttcaatacatctttttaaaagatagacttctgtaagtgacataatcctatcaacattccaatcagaaaaaccacaaataaaaaaggcatcatccttaatgcctttttctatcatacggtttcttacttgattttccgtaaactgcatgatgtctaactcacataaaaattgacttctacctttttcacgagtccttataattgcaatcattatctacttaccctgatatttcgacatatccgtagtctgaaaaaccaccttggctttctaagtcaatatctcgaccataagcttcatgatcaaaatacatctccagagcctctttaccaactccttgtacgcctaattcatcgaaataatattcacctagttctcgtctagttgtgacatcagacagtaaacaacaatcaccaaaattaaaatcataatccacaaagtctgaggcagtataacctattacctgatgcactgctttaacaagttcactatcaacattctctaccagttcaacaaattgattaatcatctcaatagaatcatgttcttttagtaactgacaatccgaatctgcaataatatactctaaatcatcttcttcacgaagccccaaagctaacttaagctcactcatttccacaggaaaacaaactaacgtagctctaccagtttttatatctctaacaattgcactaacatccatttttgacactccttaattaaaaaaggagcaagccattgacttgctctcacccttaatgaaattcttgtagtttatgaccaatcgctgacatagacttatgagccttattaatcatattattttggtagtagtatgatttcaaatgttgttgaatcatgtcgaccatataacctggtaaagtcaattcttcacgctttttaagtaagctatttaactctccagctttttcccatgactgttcatactgatggctgaccaacagctctgaaagctcctgagtaaccactaacaactttttatctgcttctgaacgtgttcctgacattttattttcctcttttttctttagactctaacaataaatcaacctattacagttggacatctaattttcataattttcacccacaaaaaaagaactcctataaagaagttctaattactcatatataaattacattacgaggattcaatacagaaagttaaaaattcatctaaattactcttatttgaagaaattaacttatctcttagctcttttatcgtctccacatcctgctcccctcgttctacaggaaacagctttttgtagtgtctcttttctttatcattcttagcataccaataaccaatatcattaaggacctcctcgaaattgctatcattccatataggaacaataaaatcttttttccaatcttttacaaataatgtagaactcttataggaatctatcttttcctgcgatgtatcatcaatatccatgataataaagattttaacgtttttgggatttccttttttatcgcactcaaccttgaaaaatttttctttaaaacattttttagttttaaaatctctattttttaaaatatcattaatcgaagatatttgtatagatgttttcccatttgacctcgagtatatttcaagaggaagcctcagttttgatttaatatgtttaacaaaatccagttcacttttaccgtgaacaattactatggcttttgtgtatttacgaaaactcatttttagtcctcgcttaaattatgatcaagaaataaatctgaaaaatcaatatctaatggatctggtacagcaccaaagaaaccagacaaatataatttttctaaattgttatttactcctatttttttatctgcctcattgccagaaatgataactttattacctttaatatctacatttaaaaaataagctgagctcggtgataattccttcaataacgttgtatcatgcgttgtaaatattaactgaccattcacacttcctttcaagtcattcagaatactattcattaaaagatcatgaatacctgagtcaatttcatcaacgatacatattttcccatccaacacattgttaaaaacttttagaagatccagaagattttttgttccctgagattctaaacttattggtacatctaaaagatcacctccaatattttttcggatcatgagttcatattttatttcttgaccttgagcatcctgcttatatttaacatcttttatatcaatatataatgcactaaaatatttataaataatttcctcagtataggaaagtttttctttttccgacttatcaattttaccttttgaaatatctttcaataataattctgtcgaatgaaaaggacctctaaaattaccactccaaataaaaattttatcaaattcatcaactactttttgaaaatttatagaaacttgttcattaataaactcttcatttacttctagacaataattattaaatattgataggaatgtatgtttaccccaatatttttctatttgttcagtcaaatctttaaaaatagtattcttaaaaattgtcttatttaatgattgagataaaccatctatgttagtaatactgaaatgaactcccttattggattttatcttaaatactagctcctcttttactagttcattattttcattatattctagaaggtaataaccattatctttttcgatattaaaataatattttagaatcgtattaccttcagatgcaattctatgagtatttttcgctatgcccttaaaagtggtgaagaaactgattttatctaagatttctgatatatcaccaaagttagttttttgattttcttctttatttgtttgttcttttaataatgattgtaatcgtgtattttcatttaaggattccattgattgtaatgacaaaactagtaacttaaaagcttcaacaatatttgtttttcctgaaccgttttctccatagattgcaataatatccttacattttcctctattcagcaaatcaaaagtcaaatttgaaaaggacataaagtttttaaattctattttactaaacatatgcatccctcgtttctattacgattttttgtttttaacatatgtacaatacaaattgtacaccactttactaaaaaacacaagataaattatccttttataaattaatatatataacctcttttgattattctgaagtcatccaaaccttcctcaaattagtcagtttcatattctcgaaataattcccttttcatcaatattctttttctaaccttaactctttcagtcttttagaaaaacttttcatattgttttttgaaagcacaatagtattactaaaattatcacttctaccaagtaaataatctacagtaacatctaggatatttgctaactttattatattatctaaagtaggttcagctttaccactttcccaattactatatgacttttgacttatatttaatttagacgctagctcagtttgagttagttttttttctttacgcaattcttttagtttttgtggaaaattagtcaacttcttcatctctaaacatttcccttctcatcagaattcttttttccaaacgatatttaccagctaaacgaataactatctctttttgcttttctaaaggttgcataagcaaaccaaactttaaaagtttccgtttaaaatcagcaagttcccttaacttatcttcgtagtctttttgaatttcataaacaccaacataaccaatcttaatcaaatcataaatgtctatctgataatctctaagctcacctgtttgaatctcaggataataaaactcacgatcaggaatcataaaaactagtaaatcaatcattttatctaaattatttcgtctattaacacaataagcaaattctcggttactatacaaaacaaaacttacctcctacaaaatacctaagctagctttgatactgtcaagtatcttctccccacgttcattgacttccccagaattaagaatggtttgtaaatagtcaccatccacaatcatgtcatactctcttatcatagctaaagacggagaaacagaatcacttaaccaacgtaaggttcgttcaatactataagcctctggctttgtaacaaattttaaaggctcaacacctccaaacattaattgccactttctatctgcttgaaacgacccatattcatttttcccatcatacacgtcaatcttactaacaattaaccctctggatatttcaccaatcggcactccagaaataaattcatcaactgccgcattagctttactttgagataaccgtatctcataacgattccacaattcaaaaatttctaaagcttcttcaacagtaattccttcctgctttgcaatttcataacgtttttcataaaagttaaaatacatttctgattgacgactaccaaaataaagcgatattccttgtctattctgctcaatctcttccatatccgaaaaatttaaagaaccgccacctatataattccaagttctcaaactttcaaaatctaactcatgacgataatattttgaaatcatatctgacaaatgaaactgttcattttctctatccttacccagatacaattcatcaatagcaatatcaaaacgtgtcacattcatatcatcacgatatgaatttcttagataacttaaccaatcatgccatgtaaatttttcagtttccatcaacaattccaattgtcggcatccacgaccagacaattgaacagttatttgaaaattacctgtctcatgtttatccgcaaaatcaaatatccaaatatctccacgtttccaaagatgattgtaattcatcaacttcgattcaaaaggctgaaattctttaaatgcacagtgcaaaaagttacgacagaaaaattcaagatccctaacatcctttaacgtaattctgacatagtcaatcatcacttgtaatcgtgaactatcattttctactagatatccaaaatgtgattttatctcttgatacttttcaagtgtcaacttccgctttccttgctcatagtttctaagtgatttcaatgtcaaaccagaacttaaagcaaattccttttgttttagacctgttttctttcgaaatttttttaaatagatagcatccacaataaacaaactccttcttaggattagtgacccacttttttcactaaaatgacccacctttaaaaatctgaaaacccttgatacatataggtttttgggggttaaaattcgaaatttttcatttcttacccccctattagaaaacgggggttttaaaattgataaatccctctgtaaagccctagtgtgtgcgctgtgtccggcgtgtccgttttcgctacgctacactacgcctacagctacactagggctttacagaaggatatttaaaaaatacccttcatctactattcacccttaaaataattcaatagtaactctttccagctaccctcaaattcatctttttgtgtcagtaaactttctaagacgactgcatcagaatcatttaatacaaccttttcatcttcacgactaaaagtcatataattatctttttcaatcatatctattaaattcttaatcttaccaaatgaaaaacctgttttcttagctaaatcaccaatactcatattttccatttcctccatttcatcatcaaaatcaaaccctactgaacccttaagtaactcattttcagacgttttttccacaaactctctcaaagattcgtctttaagaatcgccttagaaacttcctgattttctgtaggatcaaaaggattctcatgcctatttattttttcaaaagcatcataaaaagagaaatttttaggtaataaaggagaataaaattctcttgctacttcaccaaaaacagctgaataacctcgaccataaacacgacgacctgcaagatatttaataaacctaaattccttatttctattttcatcaccaaacatcatcacataaccaccatcatcgagacgaccaaccgagatatggtgcatcatattagatctaattttagtgggaagatcatctgcagacggcttttgcattgctataatcgcattacatccaacctgacgtcctaacaatatatattgagtaaatgcattatctacaatctcacgttcctgataagacaaagaactcattaaagcattatattcatcacatacaaaaaaataaggttccaatccataatcataaaactttttcatgtctttatgacctaaacgcttcatttcatttcgaacaaaatcataacgtgcaaacattatcgtaacagcattttcaaacttctcaataatatcagccttttcaaaggcaattctaccttcaaaagctgataaatctgacatagtaacaaaatcggctcttttagggtcacatatatcacaaactccaatttccgcaagacaacgaaggattgaccttagtaatactgttttacctccaccagtaccaccagcaactaataaatgaggatcattgatgaaatcccaataatagccatccattaacttaattcccttatctttattccatatcacatctttaaccgtaatacgtgataagaaagccgaataagctaatttgtaaattttaaagcgtggatcatcagttttttccataaaatccatgaaaaaagtatcttctaattctccaccaatatccttaaatttcttttgaaattttcctccagccatttcaaatgaaacacttaaatcatacttaccttgtttcacataaacttttggaaaacgatattttgtcttcgttttcttatttgattttttacgtttttcataaacatagccattctcatataaaaacttagacattctttttaatcgatctagtttattaaataatggattagcttcttgcaaaaaccaagtcaaataccaagaaacaaaaaatgctaaaaacaaacctgtacctacactgatcatagacattttatccatcatttttaacaaatctaaatagtaataactatacacgcctacaggtgtcaaaaacaaaataaatagaaaagaaaaaaggtaataactcatatacctcatatatggttttaccttaatccctctatattgtggtattaaacgagccaaattacccctcctttaccgtttatttattaactttagatgcttcattttttgatgcgtttccattatttgcaacatcctttttcttaagtgatgatgcaaaaattttaaacataccacctgaaacgttagaccatgtcacaacaacatcacttaattcaatagggtcacccaatttaagacctaaatcctcgattgcataagaaggcatatcagtaattgaaacaaaaattgtttcattttgagcagtactaaatactgcaatatcattccacttcacttcacctgttggtttttgtggataacgaccaaatcgatctggtggttgtgtcgtatcatcttccgtaaattgaactggttcttcatatcgtctccaagttaaatctcctaacaaaacatttacatccaatccatcattaaaggtacgatattccttatctgcaatttgtaatttttctccaaagtttaaaccaatttttgccatatttctaatcctctactttccttatttcacttcaataagcttttcagcccatacattttttgcaggttcaatatttctaccattaattgtattgtcaataaacaataacggtttttcaacagttaccatttttccatttccaatcacacgtgaagatgctggtgtataaacataaaacttaccatgtttttcattaaacaaaatgtgtcttgtataagacccttttttaccatttaattgagcaggtccagcttcaaatccttcataaattgcatctccaataaaatttggaagtaacactaatgtttcttgtttcataatttcctcttttctaaaaataagaagcactttttcaagtgcttctgaatattgactttttaattttctttgcgttttttaaatcctgctaaaccgatagctgacaagatgattgctccaagtgctgtaagaggggcaacgcttgcttcaccagtttgaggtaatcctttagcaggagcttttggagttgctttttgtggttcaactggttttggtttctcaggagtatgtgttaccacagtttcagttttaaccttattcccattgataaaaaagtctgcggtattgtaaacatcacctgctttgatacgtttaaccaccacaaaatcatctgccccaaattcactagaacgtgcaactttttcaaggaagtctttcttgaagactaattcatagagacctgtctttttgttgtaaactgtttctgtgtactctcctaaattagtcccttttttaatgactgtaccatcttttaatgtcacatcaactttagcgaccactttatcacgtaagtaaagatcaggtgtgcgttgtaattgatccacaaatttgtattcaaatagatcataagaacgacctgttggaactacccaaccctctaatttgtaagtaacttcatcacctaatttgacagtaccattgttgatagacttgccatcttctttgtctaacacatctttatgtatttctggagttgtcaaatcattgactacaatattacctgtatatccattgccaaagtcgatttgtgcaacaccattttgaatttgacctttagtaaactcttttttaactttaaatgataagttataagtaacatctagacctttttgaacataagctttataaaaagcttgtggatcttttgcagtccacatgtaaaactcaccaacaggactgattcctgcttctttaataagcgtttgaagtttctcatctaaagtatccgtagaaagcacatgtcgcatttctaagagttgtgacacatctgtgccatcagatgctttgattgagttcactttcatagacttaccatctagtgcgtcatctttataatcatcaataaagacaaagtttttagctattttaccttgtgatgcagtcattcctttatattggctaaagtcttgtttagcaacgtaatttaattcagcatttggtaatacggttttaccattaacagattgacctgcttcatcaatgacagcttttgaaggattagcagctggaactaaaacaggatgaacactaactgagtagttaatcttttcaggaatagacacatgtggtttcacttttggttgagctggagtgtaagtttttaatgtaggtgttacaaatttaggctcaactggtttttcaggtactggtttttctgcttcaggagtcactttttctgttgacggtggtgttggctgttttggtataacaacgttaggaacaacatcattattattaacataagacactaaagcagacccatgtgtgtcatgtacccagtcatcatgaatcttaaagacttcaacgcttccactagaaccatgtggtttaagctcatatttaagattgagttgtaaagttttgtttaaagtttctgcaaaagttttgttaccattatgtttcttctcaaaaatgatttgtccgtctttagttaagactctgaaagcaatattttgattaacagcagcattttgagcaacattacgatactcgtacttgtaaagagtgatagagtcaacaaatgctgtcacagagccatctttgttagcaacataatgatgattaactttacctgtcaatttcccatagccgattgtcttcacaccatcgatcatatcatggttaaactcgaaacttccgtcaggtttagtttttgcagtcatgattgagtttccatattcagcgttatcaacacctttagcttgagctttgatatcaaaagcaacattattaatagactgtttatctgcttctgctttagcttttagagcttgattataaagtgctaatttagcttgatagtctttttgtaactgtgcgttagtcgcatctgctttagcttgtgcatctttattacgttgacgtacacctgcattataagcttcaactgatttgattttcgctaatttagcttgataatctttttgtaattgtgcattagtcgcatctgctttagcttgtgcatctttgttttcagcatcaatttttgctttagtttgtgcatttaactgacttacacgttgagactctgctttgttttctgcgtcaatttttgcattttcagcagtagcatctttaatagcttgtgtattagcttgtgcttttgcagtaacatctttaactgtttgtgtttgattagctaaatcagcttgtgcatcagtagttgtcgcatgattaactgcagctgtggttgtaacagctacagctgcttttttagctgtagctactgctttatcaagttgagttgatgttactgtttctgcttgattttgcgttactgtttgagttgttgcttgagttgtaacttgatcagcagacacttgactagtctgtaatgtcgtgatcattcacttcataccaattgaaagtatcgtataacatagctttattgaaagcacttgaattaaatcgtggcttacgctttttatggagcttctcattgaaaaggattttggctcgtaaggcatcaaacgagtaacctctacccattcgctctacctgcctaataatgctgttaattgactccgtataagcattagtgagccttttatcaaagtagttgaatatttcaacatgccagttgtctacggctctcacgaggtctttatatgcgtctttagagttgctggacatacaacggtgtctccattgactataacgaagatgaccttcatctggatcaggagtatcccatatccagtaaaactcttctttgagttcataggcttcttttaaagcaggaagattacctaaccaagtatctaagaggaatgattcacgttcatttagatcgtgtttacgctttagaaggataaacctttcacgcataagggtacgtctttctttttggctcatatgggctttcaaagactttctgacgttatctaaggcttgattagccattctaactacatgaaacttatctacgacaactttagcttgtggaaggatagtgttcactgcgtctttgtagggcttccacatatccattgtgacgtactcaatgtaagtcctgtcactgatttctgaaagacgttggatgactgtttccttgttacggttaggcttgatgtcataaatagtcctgcgttcaatattagtcaatacaagccgaggtctacggataatatgtatctcgtctatcccaagccacttaggagtttcaaactggtattcacgttctttgagtgccacatagtccttaaaaacgttcctaatggttttctcgtcaacaccaacgctttctgcgacttctacaaaggtcttagacatggattgctcttgaatggactttaaaagccttttggtcatactacgcttttcatctacagatatggtagatccgcattcacgacacttgtatcgtctacggttcaaatgtaagcccactcgctttaaacgaatgggcaaatccataattagttgatttcttgaactgtgtttgtacaacttgtcaaaaccacattcaggacaacgttcaggtggtccgactgcttcaactttaaacatcatatcggtttcattttcttgtggcggttctattgttttaatgtctggtagggataataagtctgacatattattcatcctttattactctgcggtgttaaggtatcaattatagatttgatgtcgaaatcatcagtgttaaattatttttgtgaccacaaatgcacttagaaaatcccttaaagcattagctggttcacttgaatagggagttgtaaaaaagttcccttagcctgcacaacaagataatttcgaaatatctttatcgaacgtaagtgcaactaattttagcccttcagccattgttaaatatggtgctagggtttctgttaaatcttctatcgttaagccaaatttaacagctaatgatgctgcatagatgacatctcctgcattttcagatacaatatgaacccctaatacttttagtgtttctgcatctgctactagtttaaatacaccggttgtttcacggtttacaattgctcttggaacagcacctaaaggtaatacagatgtcttcacatcataccctttctcttttgcttgttcttctgttaaaccaaccgttgcaaccgtcggattcgtaaacgtaacagcaggaactaccgataaatctatttttttgtttaatccaccaatagcattatcagtaataattccaccttcataggctgctacatatacaaattgtggtcctaaagtcacatctcctgctgcataaatcttttcattacttgtttgaccaaaatcattgatcaggatttcattattttttccagtttcaacacctgctgcacttaaatttaaagaatccgtatttggttttcttccagtggcaacaagtaactgatctgattcaatgacttctctactgccatttactgttacgtaaaccctttttatctctccactttgttcaacacgctcaaaagttgcccctttgacaaggtttataccctgttcaattaacgctttttcaactgactctgaaatctcaggatcatactcctttaaaagtcgctcacttctttgcataagcgttatttctgaacctaaatgatgaaatagttgtccaagctccattccaatgtatcctgaaccaattacagttaatcgttttggtattttctttaactcaagaagtgttgtactagttaaatagtccattttttcaagtcctgaaatttggggcaacgaaggcgatgcacctgttgcaattaaaaagcgttttgcagataactttgtcccattgacctcaaccgtactagcatcaacgaattttgcttcacctttaattaaatcaaaattatattcatcaattaaatccatatatttttgattccgaagttcgctcaccaatttatccttttgcgtgattaaactagctaaatccacttctccagcggatgtttgtaaacctataaacggattgtcttttgataaatgattgatttcccctgccctaagaagagtttttgacggaacacagccaatattcacacaggttcccccaaccgttccacgctcaatcattccaacttttgcaccgtattctatagctttaattgccgaagaaaaggcagcagcaccagaaccaataataagaaggtcataattgtcttcattaattaacgccacgttttctagtgatgatacttcttcaatttctccggcttggtaatttgcttcatcaatcgcctttattgcactttcaacctcaatatcatcgggcagttcaaatactgcttcaccacgacgataactagactcaatatttttagcacctatcttttcaagtgctgattctacgtgtttttcacaacccgtacaagtcattcctgaaatgtttaccttaaatttattcataaaaaagctcctttcgttaattaatctctcatgttaatgtttctattattggacacgaatgtaatttcttttcatctggacatcgttgttttaagtcgtctaacatagtttcaattcgttttaaatcctctatttgtttttgcacttccttttgttttttagaaacaaattcgaacatatcttgacaacgaacttcatctttatctacaacaccaagtaatttataaatctcgcttaaagagaaaccaagttcctgtattcgtttaataaacccaacacgcttaacgtcatcatatgaatatatccgataaccagcttccgttcggtgaggttcttgtaataaattttttcgctcgtaatatctgatcgtttctttattaactccacatttatctgcaaactcactaatgcgataaatcatcttatttcaccccctgaatattataaaccatgtaccatagtacacggtcaagtaaattggactattttatttttttcccaaagtatcactcgtatgtgattgatacttttatataatactattgattatcctaacatcccaccagaaaatccgatttaaacaccagttgtttttaaactattaagaaagtaattccactatatattccgaagaccctttaaatttaagttaatctaaatatttctgaactttcatgctaatcaattaaatttcatacgtgtttcttatttaatcttacctcaacaaaataaattttattaaaatatataaaaagcagactatgttatattttccatatttaaagtgttaaaagcccaacagtataaatgtcgattcttctaaaaatataagtagttgttatcttttgatttcattatacctttactattctatttaaatttgttcggtttcagtcacaccataaaattaactttttaaataagattttatttcggtatcaacataaacactttatagcgatctgaaaaaagagtaagattctgattcccttaaacttttattcctgataagagaattctttatttttaaaattaaacattgaaaaatttttatcattgtactaaaattaggtgtggttaatatattatttaaccatactatttcaatggaaaggtttatagttcaatgaatctacaaaaaaatgataaaacaaatagttttatccattatgcaaacggtccttccctagaagaaataaatgggacaattgaagttcctaaagatttgagcttttttaaaactttactagcttattctggaccgggtgcacttgttgctgttggttatatggatcctggaaattggtccacttccataactggcggtcaaaattttcaatatttactaatttcaattatcttaatgtctagtttaattgctatgctacttcaatacatgtcagctaagctaggtattgttactcagatggatcttgctcaagctatccgagcaaggaccagtaaacagttgggaattgtcttatggattctcactgagcttgctataatggcaacagatattgctgaagttattggtggggctattgcactttatttactgtttcatattccacttgcgattgctgttttcattacagtatttgatgtattactcttattattgttgacaaaaataggatttcgaaaaattgaagctctagtagttgctttaatattggttattttcttagtttttgcatatcaagtggctctttctcatcctatatggacggatatttttaaaggtttagtacctacatctgaagctttctcaacctctcatacagtaaatggacaaacaccactttcaggtgccttaggcattattggggcaactgttatgccacataatctttatctacattcttcagttgttcaaagtcgaaaactagatcataataacaaaaaagatatcgctagagcaattaggttttcaacttttgattcaaatattcaattaacagtagccttttttgttaattcactattactcattatgggcgttgctgttttcaaaacaggaagtgttactgatccatcattctttggtctatttaaagcactatctaattctactattatgagtaattctattttagctcatatagcaagttcaggtattttatcacttttatttgcaatagctttattagcatctggacagaattcaactattactggaacattaacaggtcaaattattatggaaggatttattcatatgaaagttccaatttggttccgtcgtatcattactcgcctaatttctgttattcctgtaatgatttgtgtcttagtaactagtggtagaagtactgttgaagaacatatagctattaataacttaatgaataactctcaagtcttcttagcatttgcattaccattctcaatgttacctctactaatatttactaatagtaaagttgaaatggatgatgattttaaaaatacttggataattaagattcttggttggctttcagttataggattaatttatctcaatatgaagggattgccaaatcaaattgaaggtttttggggagataacccaactcatcaacaaattattcttgcgcatcaaatagctcatatcatcattattagtgtaatactaactttaatatggactattgttgaattgtataaaggaaataaaaaatacagtacgatgcaacaaagtgcaacttaatttagtaaactaggtagcctcaagtaaagataaaagtagtagaataattctactacttttattgatattattttttaagaagtcaattataacattgaaaagaactcaacataaggagttgctatctattttgataatattattgatatgtataaaaaatcttgttgtaacctaaaatatttagagatcattagatacagccttagtggctggtgctaactggactcagaatttattcttagagataaaaatgtatgtacatattcccatattctagataacttatactaaaaaatttttattctagaatataaaaattactttaatcttttttaaaacccaaaatgacaaatcccttgattttactagatatttttatttagaaattaaatttaaattactttaattactaatagggacatctaactcaacaaaaaaagccctagggatggggcttttagtgttccttgaagtggattcgttgcgattttaaatgaaatttttgataacctcaaattcctctttttaatgcaaagttatttataaaggctagcttatcataggaggttacattccatttaataaccatcttctatttgataagcacactatcaaaaaactaattacactaaggcatatcatataaggaacaattataaaaaagtcggttaaatcaatagtcatcggatgtgagaaaagtttccctattattttatagagagaatttgaagcatcaaaaatagcagatactttaaaaattcctccaattgccactaaaataatggatgtaatccaataaaaaatagtaactccaatagaaactagcatattagaaaacaggatactaatagttgagacgactagtagatactgtagaacaacgagtgaaaataagattgtagttgttaaaaaataaaatagtgaatatccccaaagcaatgaagctaatatattgcaaactattatagcaataaaaaattctgaaaataatactaacagtttagtataaaagtatttagttagatgataccctgaaaaatagtgatataaaatacatttgtcagagtaatctttattaaagaaatatacaatgacaaagccgaatattaaaaatccaaattgggtaaatactgtgtaggtactaaagtaaaattctcccaaagttaaatgtcttattttatctatccctactggtaaaatatatcctaatacataggtcaaagctacagtagatataatataaaataatgttctacctcttatagactttctaaactccaatcctaacattttttattctcctaaataccaactaatagcatcatctaatgtgtctactttacaaattttttgattatcaattagaaaatagtttccctttaaagacctgatattattgatatcatgtgaaatattaataataattttttcgggataatactgaatatagttttgcaaaaatacgtttatctcatcaacagactttttatctaaagcattagtaatttcatcaagtataataatatgcttgtctaaagacaacaaaactaataatttcaccttttgtttctgcccatcacttaattgctttaacttaaccgttttacttatttgattaatattcaataactgataaatttctttagaaagcttccacggaattgtcctttctaaatcgttaatggtaacatcactaggaagattagaataactcgaaataatcagcgtgtcttcataaatatcatttgaaaaataattccctctatttatgataaaatctttagctagttgagatttacctgatccattcctacctaaaagatgatttatttccccttcttcaaagtctaagttagtattctctaaaagtattctatttcctatttttaaggtgtaattattaataaacatagctactccaatttacttatttcagacagcaacctatccataaagattaaactctaattaatgggctgaaccagcaacccatctattttttgaatttcttacaaaataccataaatcgtttacattgtctaatttatttttcttagttagaacttttgcaaagctcatatcatttagaattggttttacttctctctgaatatttttatttcaatagtcaaattactttatataacaactaaaaatatatttaaaaataaatttttggagatttttttaattttgaaaatcaactaagattaatatattcatcttttatgtaatattcaaatacatttgagtactctaaaaaaggtatatcttgtatttcttcaataacttatttttgttctagatttgttctagaaaatttatctttctttattaatttttataaacaaaaagtgataaattccttgatattacttgttttctttttttatacattaactttaaatacatatagttactttgtaggggcattaaactacataagaaaaagcctttatttaaaggcttttttgcttgacagaagaggatttgtcccatcatttgtccccaaaattatttattatttttcttgaaaatctttatgaatggtaattgagtttagacaatcacagcctattatcctttacacaataatattagttgaaattttgatatgaatttgacaaaaagatattcataaatttcattgctgattggtattctccttggttcagattaagtttcctattaatagaaatatatttcgccatttgatttgtttcatccaataaaaatcgcaaattagcctcaatgtcttttaaagatttatttgaaaaaattttcaatagttgatctttatctgtaatatattgcaagatatccttgtcgagctttccaaaagataatgaatcaagctctttttctattaatattttttgttttagaagtttaataaaagcatttttaataggattagatatcataaactctgaataaataatatcatttcttgctatccccttgactacataagtactaacccaatatatttcattaagaattttgttgatttcatcttctgacaattgctttgtttcgtacagagaacttctttcaaaattataatcaagatatttattctttttatctaaaagtacttttgaaaaagcatcatctaaataatcctccaagaattctggtttaataagtcttaaatcaatcctcgtcagatcttgaaactgcattaagtaagcaaagcaattgtattccgtcttatttctaaactcatttggtttctgcattataagaatatcaccgaattttttatgataattagtgtcagaaataatatcttctataaaattagtaacaaaaacaatatcataatcttgaaaatcatctttcggtacatttgggttagcccgagatccattcaatagtacagcttcgattctcttatcttggtttgctatgtttaacaccaaattatatatttcttgctcatctctcataatggctacctcctacttcactttatattaccatgttttttctaatacctttatattacccttgtatttttctctaagcatgtaatcatagacttaaattagcatggacatacctttacgacctccaaggattcaattttaaatttttcttaacaactgattatgattccaaatattttcaaccgtttaatgttagtatgtcatcagttatcatcactctttttatgatagttaagatttttaaactatcatcttttgaaaaacatttcatcttgactatttctgttaataaatcagctccatgagcaaaggcatgtatccatccaagctcctcgtcaaagcctctaaaatcaggttcatctataagccaggagaatgcctgattcataatttttatctgatcttcttcagatatccaacttttattatttgagtcctccaataataaagctagtaatagagcagtaaaagatctgtttaacacagtattactgttgggtactcctaatccttgtaaaagaaatttatcccttaaaactctctgaaggacatttaatttctggctttgcatcagtttatgttctattactaatttaacccaagacccatatactatttcatctcgaactcttgggttccaatctcctatatgatgtaatcaaaaagataaaacatcctcatcaattggataattattttctatctttttgattacatcacttgcttccatgtttctccttgcatgactttatattttatattttccaaagtgtaacatttgagttttcgttttcactttaaaatgattatagtaactttaattttttacttggatactcacttttatatcagaaatttttagtacttattctttgactctaggaataaagcgaaggcctaccttgtaacctctattaggaaaaaattgaggcatactataaatatacgatagaactaaaattaccagagaatatagaaagtataaaaatctaaaatacttctgctttaatttataatttccttgggttttacagctcgtgtaatatagtatattccagaaattaaaaagtaaaacataggtaatattcttaataaggcaaatggtgtttcaaataagaatgctaaccaaaatattttcccttgcatttcccatagaccttgcgtcagataccaactttttggatcaaatatggtgatagaagttgttcttatcaagagaaagaaataaaataaagagaaaaacgcatgctcacaagtatatttataataactcatagccatcgctgattttgattcttgatcagaaaaaatctctgaactggtttcaggctttattttttgaaaataatgcagccctccccaacgactaccgctaatatgcttccatccactgtcctcaaataaagtgatatagttagcatagtcatctttcgacatgtattttttaaaatccatttttattgacatcttgtctttttctttatctctcttaaaataatagaaggctggaagaaatgagttaatgcctgtaaaagcatagccacttttttgaaccttatcgatccattcttcctctttttctgtggatttaaaaaataatttaaactttatcataactatctcccccaaaacccaactgattagcagtattaagtaactttcttaatcgattcgtttcaagttctactatttcttttcctgtctcagtaataatataaacttttcttcttctatcgtcacttgggatagactttatccatttttgtttaagtaaattttcaatggcaccgtacattgtccctgcggctattctaacatcaccgccactcatttcttcaactttttgcataatagcatagccatgtgcttcctcaaacaaagctaataagatataataggtagtttctgttaacggtaaatgtttattccttttcatcaattttctttctatacagttaaactttatatagttattctatacaatacaactatataagtcaactgtatatttaaacttattaaaaagaaaagaacagatagcctatccaattattcgtttggagttttttattttagtcgtaacttctcaaaagtactatagttttttataatctattgactatagtactgttgtttattcatctcatcctgatcttaatacctttaattatgacttcttatccaatctatacagttaaaatacctcctcataaacacaatagtttttaaaattaataatagagactagagttcatcactctggcctctattattttttattcaatttatatccattgatttatttcttatgatattacttgaataagctaccataaccaatgataacagtaatcctaaaaatttctttttctatattctacaaccacttttccaatgtattatctaaaataatcgttatttgggtttattcatctgtttgactagtttttttcacaattaatcaagaagttttacatatatccttgaatctctatctggaaaaatgtagtctacatctagttcatctcttgttatttgcttaaatccttgattttcataaaagaagtgagatcttttctctttttctggagtatccaagacaattcttgtgaatttactagctcgagcaaaaagcataaatctttcaaataattttcgaccaagtcgaacaggatttcctctatattttggatatgtaaaaaatttttttagaacagctgttttatcatcaatacgcagtaacgcaatcgaaccaactactttttcattttctaaggcaatccaaaattgaccttttctgttttgataataattttctatttgaaaaatatcgtcttgttcagccatctttatatcaagtttagcttctatattctgacaataattaattaaatctactagctgtgctaaatggtacggattattctcgtattctttaatttccataatatatttccttattttgactttaaagtatatttctgcaatgaggtatgcataggatatcatattagttggaaatattgatctagataagtcaaatagcagcaaagctcttaattcggttttattttttcaaaaagtagctatcgccttattgatatcttatcaaaattaaacttcacttttttcaaaaatgtacatgctaagtaataacgtcattataataagcaaaaacactaatatgctcggttccattaagtcttgaactttaaactttccacttaatatttctccttgtttttggataagaagcataggattatagcttttactgattttaaaaaatccagatactacacataacaccaccataaaaagacaacctaacaaaccccctaaagttttacgaaaaagaactgaaaaaaagagtattaagcttatgaaaagaataccgataaaccatgttgcaccgtaaaccattaatttatgacttccttcgttactaaagtaatataacgtataactaaaatggatgacaacacttaataagtatgacactgtccatagaagggtaattactataaatttagcaaggattataacttttttggctaatcccttcgtaactagattaattaaggttccttttgaaaattcttgcgtcagtgtactactaaataaaaatactaaaataactaaaccaagctgattcatatttttaaaatactgaatataagaatcaatataggtaggctctggtatcgctccctgtagttttttaggtaaaattcctgccataatatcaggcatcataagtgcagttaagggacctaatataccaaatattgaacaagtaatcagaatagatataactttgtatgtcctaacattctccatccattctttttttaacattactgctaaagatttcatttggtaacctccaaataaagctcctctaaactattgtcaatgacttcaatagctgatgggctaatctttaaagaaactaaatcttggtaaaaaccagctagtaaatctgctttgttatccattttagagcctttgagagtcagtgcatactcattatctttcttttctatctgatagttatgagatagtaccttagcttcagactttgtcacttttattaaaatacgaaccgaataattttcctctgatttttttccttttaactcttcaagagaataaatcccacacttagttaacaccagaacatgatcacatattttttcgacatcagagagaatatgggtagaaaaaatcacagttttttctcctctaagatttgaaataatatctaaaatatcttggcgacctttcgggtctaatgcagaggttggttcatcgcaaataataattttaggatcatgaaccagtgcttgggctaatccaagacgctgtttcattcctcgagaataagtagcaatcttttggtgattatcgtcaagtccaactgacctaagtagttctttgttagaaagcttatgctttgatctcgctaaaccagaacataaatcaagatattctagagctgtcatataatcgtagtactcgggaacatctgggagatagccaatcagttgattggtatctgttcttccaaaattaacttttttaccaaaaattgttatgaaacccgtatcaaattttaacaatcctaaaatcatttttattgtcgttgttttacctgctccatttggtcctacgaatccataaatcatattttcttctaaatcaaaagaaacattatttaatatttttttaggaccaaaagattttgtaacgttttgaaatgagatagctttcattcattattcccttccaaaataagaaatgcaattggcccaattatattaagaaatataatgaccaaaaaccaaactggctttgaaaggtgtttagtcatcttaagtttacttagtttgactagagaaatgataattaaagctccttgcaacataatcaacggaactaggaatggtaataattgatttggtatttctgtattcatattagtaatccttttttaaatcgttaagtttttgaatcatttgttgaaattctttatgccctgatagttctttaaattgtgaattttgaaataagtcctcaactcgttctattacctgtaattgactcgtcggtggtgcaataccagtaggtattgtctctaaccaatcatcgatggtataaaagaaagtatcaccgtgtaattcaaatctttggagcaattgttttaaagatttaaaacattgttttaagtatcctaatgccttatcatcatcacttttactataatgacaagctaaactataataacacttgatgactgtgttgggatgcaaagagtttaattgaaacgcttctatcatatgttcaagcctttcaaaaatatcgcctttgttttcttcaacttcaaaagttgataaactcaatagatactcgcatacaagtagaatctgctgataaatttcaacctgtaatacttgcttagctcggtaaacatcgacttttgcaaaaaagctattagctaaaagtaattcttcacctaatttatagggactattctggtaaaggtttatcacttcatcatattcaaggttgtgaaaaagaacgaccgttttgaacattatcgccgtctggaggtcagactcaactactgttttactaataattttatttagtgtacttagtgaccactctttcatttctgaatcattaaggttggttaggttgctcaagaccatattaatcattatcaacagagtcttaaaatcgttagggaactgttttgataattccttaacttcctgaaagaaatctctctcagacaatacatttgcttttatttttagatccttaatgagctgatttctttgatcatctgacaatgttttttgataaccgactaagtcatccaagctaatatcaaaaagattagccatcaaaataagatagtcaatatccggtttagcttgattattttcccactttgaaattgtagtttttgttaaatgcagataatcactcaaattctcttgcgtcataccaatctgagtacgttgtaaatagatattctctccaagcatcggtcaatctactttcacgtccattatagagtttctaaatcaaaaataaaagttcctatcaggaaatataatataaaaaagtttccctagaagaaactttttcgttgattaataagtggcaaaacagcattaataataacaatggttaaataaaaattaacttcactaatatttgtcattgaaaaataatgaattataaaagagcccttaagaaaggctcttttataattcattggtaactactatttttattgtaactctttcaaagatacaatagcagacaaaccataatatgacgatgctcctagtaacaacgaccctaaaatatccgttaaaaaatgattttctaaatagagtcttgaaaaaataactgatgcaaggatcactaatgcaaatattacgaaaactacttgtgacaatactcttctcaatctctgtctcgcaaccactaaaacaagaatcattaataaaaacgctgatatcgtatgtccactgggaaaactataacccgaatcaaaaacaagttgattcataggtctatgacgtgcgatgatatcttttaaaagcaatgccaaagcattggtaccaaaaaataacataaatagccacacagctattctttggtttaaaaaatattgatacccaaggataacaagtgctattaatgacgttgtcaaagggctgacaactgttgatattatcgtcattaagttagttaaatcgggatttcgtatgctttgaaaaaaagctgaagtgatattatccaaataacttatcatatcactttgagatttaactgctaatgttaacactaaaaaagaaacaagtagtataacacactggaaaaaggatttcttgttcactacataacctcactttaataaagagataaatcttcatacattatggtttaaaatatttaaaaaatgcttaaagtacgcgctaaccttttaggtttaaatatgactattcacaaactagaagaaataccaaatacgaacttttcctattaattagcgttcaaattttcattaataaagcaatattgctacaatatacttgaaacggagggaataatggatattacagattatcaaaaatgggtgagtgaattctataaaaaaagaaactggtatcaatacaattcttttattagaagtaactttctttcagaagaagtcggcgaattggctcaagccattcgcaaatatgaaattggacgtgacagacctgacgaaaccgaacaaactgatttggaaaacttaaatgatataaaagaagaactaggagatgtcttagataatatcttcatacttgctgatcagtataatatctcactagaagagattatcagcgcacatcgcactaattagaaaagaggtttgaaacatgagaataactattttttgtggagcaagtactggggaaaatcctgtttatagtgaaaaaacagttgccttagcacaatggatggcacaaaacaaacattctctggtgtatggtggaggaaaagttggcttaatgggagtcatggctgatactgtgattgcaaatggtggctacactactggtgttattccgacatttttaagagatcgtgaaattgcacatgaaaatttatcagagcttatcatagtaaataatatgcctgaacgtaaggcaaaaatgatgctacttggagatgcctttatcgctctacctggtggacctggtacccttgaagaaatttccgaagttatctcttggtctcgcatcggtcaaaatgataatccttgcattttatataatgttaatggctactttaatgatttaaaaaatatgtttgatcatatggttggtgagggttttcttagtctggaagatagagaaaatgtcctattctcagatgatattactgaaatcgaagattttataacgaattataaagtccctagcacgcgccaatactagattgataaaaaaaggaagtttctaattgaaatttccttcttttttcgaagcgattacccttggttcatttttctttcagctggtcaagcccatcctctcaatatccaaactcatcctttctgctcgagaacttataaatttttaggtaatctttagagaagccaaaactatagtcttgtctatgtattttatcttattagaagtatccaagtgctcgtccctattgactaatgacttagaaacctatacattatacattataatatttctttgtcgttaccgttattaataaggaggtaatcaattgaatcaagaaaaaaagagacttaacctaatcgggctgatacttttagctcaggctattgttttaagtttggcgactacactatttgctgaaatcttacaaaatgatgtctggataggtatagcaagtactttaatcgccttactcattccttgtttttttatgggttttaaaaatttaaaaaaacatctaacggcaacccatcatacaatcactttcaccactattttattcttgttaagcattatatatactactaataatatagtctccacaatatgggatgttgtgctaaatcatctcaatattatggaatcggaaagtcaaaattatgatgccacattcaatatacttatgattagttattctgttgttgtaggtcctttttttgaagaagttttataccgaggaatagtattgaatttattatccaagtatggtaaatggtttgccattatcacttctggcatcctatttggtttaatgcaccaagacatttctcagctattgactacatctattgcgggtatcataatgggttttatcgcttaccattattcctttaaggtagccctactccttcatatctgcaataactttatcgtagaaattttcacccagctatcaacagtaaacgagttatacgggacttattttgaaaatatattgctaattttagcaatcttatttatattatattacctttttactcataggaatactgctcgccgtcgtataagtctgcactctaacgttcgagaggctgactcaataaactctaaacaacatacaaaattattacttactagttggccttttattctccttgtcatttacgacattgtcctaacaactattaattaagaccaagccacaagacacaaaaagtatggttttgaaaaggataatcatcctccttttcaaaacacatacttttctttatgtttactaaaaggtcattaatagtgagataatgtcaatttttttattatcaaatatggtagactacacaggacatatttacacttctagatttcctctccacgcttctgtgccgccatctacattgattactttgtagcctttcaactcaagaaattggcatgctctaatagatcttccccctcgttgacaaacaagataatattccttatttttatctaactgttcaaacttatgactgagttgactcaaaggaagatttatcgcacctgaaatatgccccccacgatactcatgctcttcacgaacgtctatcaaatggatattattatgctgggcaatcaatgtttctaatgctacaacagttatctttttagtcataatctttatttcctttgatacttggcaaatttagtcaaatgactaatcactttattatttaaaatggtgacatcgttctactattatgactattatcgtaaaccttttaatcataaaaaccatggtagtacaaaatcacgaagtcgacagcatcacacgaaaaatacaaatattattttaatgctgtttgaagtgctgcttgtaatgttacaatctcttgatcaacttgttgtaccgtaacatttggattcaactgaactccaacagcatgtgtgattgctttatttaaagtattgtaaactttaaattctttgacgttaagtacttttttatctctagtaaagcgtgtattccagatttccttatcaagttttgattttgtatagattgtagctctatcagttggttttaaatcaggataagttaaaaccttttgttctaatgcctttacatcgttaacttgagctttaattgaatcaactgaagcaaatggatctaaaatgcgaataaccagcttagttatcccaaatcccatatcaatatttgcttgactaaccttatttgctaaatgttgagttgaaaaagtgattgcttcaatcacatctgttaaggcttctacacgactaccaatagaattcaaatcataaactgtctcagggttggcacgcaatgaagtctttaatttttcaacactagtaatagcctcattaaccgttttttcataatctgttccctgaacattatctttgatatttctcaactgaatgctatcttgatcaagcttttgagccatttgctgggcttgattattactgtttacatgatttaccacttgtggagttgtcacttgatcagcatgtacttctaatacagctggtgaaaataacaatgcaccagccactagagttccagatagatacatcatatgtttaacgttcataatgaatttcctcctttaaactaaaatcacttttactgcagtatttttaatttacagggcccatgtttgtatcttactacttgtccaaaaggtcgtcaagcgctttcttttcccctatattttacattattacaaataaactgcatttttttcataaaactaatattatcattttgctataatatacttgcgcctatccttttgttaatttctgataatttaatttatattttcatgtaaaaaaccataacgataatttaccaccttatataaatctaaatattttagaaaatttctacttatcactatttttatcaaatagattagcctaatgtttttcttaaaaaataaatttaataagaagcgtactattttagataaaatcgttccattatgcccaaaaaccatactaaaactcattatttttactttctgtttagaaattcatactagaccaagtattttagacacttaaaaagccttaaacataataagttcaagactttttattacttagtattttaaactgtgagtttgtttggcagttccctccgatgatttttaccccaattttttgaaccaaaagttaacaatatcgtcagccatagtattgatatctagattacatttactggtaactatgttaccatgtgtatggataacttatatcaaaaatatattaatctaaaaaagtgaataacccttataaaataagtaaatcctaagtacagcattaacttcaagtaaacaatttaacggaggtagtatatgaaaatagcaataatcggatatagtgggtcgggtaagtccactttagcaagaaaattgggaaattactataattgcaatgtattacatcttgatagtattcacttcgccccaaattgggaagagagaaaatatgatgacatgattgacgatgtcagcaacatgttagaaaaaagaacatggattatagaaggtaactacaaaaaactgctatatcaagaacgtctagcagatgcagatgagattattttttttgactttaatcgcttcaactgcttgtggagagcattcaaacgttactgtaagtttcgtggtaagactagacctgatatggccaatggatgcccggaaaaattagattttgaatttatcagttggattcttaaagacggtcgctctgacaaacaaaaatcaaactataaacaagttgttgaggactaccctcaaaaaataaagattctaaaacaccaacgcgatcttgatcaatacctaaaagaactccctgttgcatccaatacagaccctctcaagagcttgtaattattatactgacagtatttactcgtatatctcgctttaccttttctattcttattcttgaaaattaaattgtttttcatgttccaattttctgaatattctgctataatatgataatcacttggtcaagagacaaaaaactattcacttttagaaaatagctgtctctaatcgacctttggaatagaggaggacactgaatgacaacaaatgtaatggcaaattatagctacggagaagattgcttcaaagaaattcctagcgttttggcaacttaccgtattcaaagcattgctttcgtcggtggcaaacgtgccctagacagctcagaagccgaggttcgctctattttagaggaagcaaatattaaagtcacaggaagctttgtctatggaacggattcaacacaatctaacattgacaagttagtagccaacccacaagttcaagccgctgatgctatcttaggttttggcggtggaaaagctttagacacagctaaaatggtagcaaaagagttaggtaaaaatagctttactatcccaactatttgttctaattgctccgcaggtactgccattgcagttgtatataatgatgaccattctttcttaagatacggctatcccgagtctccacttcatatttttatcaatacacggattattgcacaggcaccaagcaaatatttttgggctggtattggggacggtatttcaaaagcccctgaagtagaacgtgctaccttagaggctaagaccaataaactaccacatactgcagtgttaggacaagcagtcgctctgtcttcaaaggaagctttttatcaatttggtgaacaaggtctaaaagatgttgaagctaatttagcttcgcgtgcagttgaagaaattgcgcttgatatcttaatctcaactggctatgcttctaatttagttaatcaacctgatttctactacaattcttgtcacgcgcatgcattttactatggtacaaccgctattcaaagacaaggtgaattcttacatggcgttgtagttgcgtttggtgtgttagttttacatgcttatttcaacgaactagaagaacttgaaaaagtagctcgttttaataagtcactaggtttgccaacaactctagctgacgtctctttatcagaaaaagatattccaaaaattgttgaaattgcaatgactactaatgaatacaaaaatacccctttcgatcccaaaatgtttgctcaagctattttagcagcagacgctttcggacagacactagcctaataattcaccaactcgattattccgatacaaaaatcccttagacacatcatctaaggggtttttgttattaataaagtaaaaatactgctctccattataggaagttgcagtattaatttaaattcttagtattgtatcagtatttttaaataactgctaaaagattatttttgtagttgtttcaattgtgctaactgatttcccaatgatactagcatttctgtctgtaacttttgaatctctaacaattcaaactgatcttgttgtaccatatgatcaatcttttcgtgcaataatctaatttctaactcagaggttttattgacattaaagtcatttcgagcttgcaaacgatcataatcagcagcacgattttgactcatcataataagtggtgcttggattgcagcaatcgttgataaagctaagtttaacaggataaatgggtaaggatcaaattgaataccaaaaggcttcatgatattaaccaacatccaaatagccataatggatacaaaaacgataataaaagtccaagatccgccaaaacgtgcaacatcatcagcaattcgttgaccgatagttgcttgcttgttcaaacgctcttcaacgttgaagggcttctcttcttctttcatcaaggtagtcacattatattttatcttctcatttttctgattcgctcgctgaacaatttcgtcaagataattcatacaataatgacttaaatttccatacgaaataaagtcactatccagagcaaaaggataacgtgctcttattaaacctttaatgcctaagtctaaatcggaaacaaataggccttctgcttcactataaactttttgatcaataaaatcgacacataccatttttatacctccctttctcaaccaagatttattcaatatttgaatacggtcaagctagccaacaggctataggcttttggtactatataagtgagtatttgatacacccctattaagctttacagcgttatttcgttagtctaaaaaaatcgctgacatccatattatgccttaattttatgctacccatcaaaataacgctttattctaagtctataaacttaaagaaaacttaaattaactaatttatcttagtatagaaggtggcttaaaaatctagtttaacctctgttttggtacgtaacttttattataataataaacgaccaactaaaaagtaagaaagttaagaggactttcttacttgctttttttgtatatagtcaattaactcaagagtcagatcatagcgtaaaaagggagtaatcaaatagataccattaaaatagttcaaggcttcatcaatcaaggacttactctcgtttaaggccaaagttaaacaagcttctttgtcgtcctttaccttttcaagagcagataaaaatgactcagaaagtttaataccaggaacttcattgtgtagaaaaacagcgttattataacttgttattggcataattccgataaaaaagggttgttcaactgttttagtaagatcagctaattcctttaacacagagtgatcaaatattggttgtgtcataaaataatcagcaccagaagctacttttttctcaatcaattttacggttcgagtaaggtttttcacattaggattaaaggcagcagcaactgtaaaatctgttggacgtctcaagctagcaccactataagataaaccttgattaagttgtttaatcagagaaaggagtttaaaggaagtcacatcataaacactagtcgctcctgggaaatcaccaagtttagtcggatctcctgttatggctaaaatatggttaaaacctaataattccatgcccaacagtctagactgtaaaccaattaaattatggtcacgacaagctatatgtagtaaaaagggtgtgctaatttcatctttaagcaagctagctatacttaaattacaaatacgtgtattagatagtgaattatctgctaaagtaattgctgcaatacctttttggtcaatcgctcgtatagccttttgaaactgaacgatatctaaatgctttggaggatctaattctgcgataattgttacttctttttttaccttatccactagagtatctgttcgtctgatacgcctaacaaaatcttttacaggtattataggagtaacaacctttcgttcaataggtttcaatcctctaatagatcgtttcacagctctaatatgatctggagttgtcccacaacaaccaccaataagcctaactccttctgctacgagaagttctgcagattttccaaaatactctgaattctgactaaactggtattgactattctcaccatctaaagataactgacttgcattaggataaactgacaaataagactgggcaaataaaggaacttgcttcaatgattggatcatatgatagggtccaaggtgacaatttaagccaatcacatctgcacctagcataactaattggctgagcgcctctacaataggctttccatttgatgttacccctgcttcatgaagagaaatattagtaataattggtagatcagtcatctccctcacaatttttaaaactgtcgttatctcctcaatatcataataagtttcaaacaataatccgtctagctgtcctgtcgccaataaagcctcaacttgttccaaagtttcttctacaatattatccaatgttaaatcgcattgtctttgagaacgaaaacctccaacagtacctaaaataaatgtttctttacccaaagtcgcttgatgagctatattaactgctgcttgattgatagagacaacctgatcttccaaaccgtagttctttaatcgatgacgttgagccccataggtattcgtctgaataacatctgcacccgcttcaatataagcttgatgaatggctagaaccttttctggatgtgttacattgtaggattcatgacaagtatctagcccataagtataaaggagagttcccattgcaccgtcagctactagaatatctgtttttaatttctctaaaaacttggacatcttctttactcctccctcatggcaatcctttactgattaacctattaattatctaattgctgacgaacctctttggtagctgaaacaagaacctccaaggcagcaattgtttctgcttcacggcgtgtttttaagccacaatcagggtttacccaaaattgctcttttgatagacattttagtgatcgttgaatattgacaataatttcttccttagtaggtatgcgaggggaatgaatatcataaacacccaggccaattcctagaggataaactgctgtttcaaaactttcaatgatgtccccatgacttctactcgtttcaatagaaataacatctgcatctagtgcacggatagaatcaataatttcgtcaaattttgaataacacatatgtgtatgaatttgtgtctcatctttcacagatgaagttgcaattttaaaggccgcaacagcatcatctaagtaagcctgttgcttttgctggcgtaagggtaaaccttctcgaagggctgcttcatccacttgtataatagcaatacctgattgttccaaaagttgaatctcatcttttatagccaaagcaatttgattaaaaagatcagatcggctaatatcatctcgctcaaatgaccagttcgttatagtaataggacctgtcaacatgcctttaacaggtttcttagtcaaactttgggcataaaccgtttcttcaaggcttaagggttgaatatgtttgacatcaccataaatgataggtggtttgaccgcccttgaaccataagactgtacccagcctaatttggttgtcgtaaaaccagctaacttttgaccaaaaaattcaaccatatcaacacgctcaaattcgccatgtactaacacatcaagatcaagatcttcttgaatagcaatccatcttctaatttcagtttttatgaaatctttataatctgagtcagatagatttcctcttttccaagcaaggcgtttcttcctaatttcaggtgattgaggaaaggatccaatagttgttgttggtaaaatcggtaactgtaatttttcagcttgcaaagcttggcgtaatttatacggacttcgttcaagctttacttctgctaatgattccaatgctacatgacgaaaatcagcagcttgaagagctgaaaaacgagataaagcttcgtgatatccctttgttttattaccatcaaaagcactagctaatagttctaattcctttagtttttcatcagcaaatgataagccattctttaacacagggtctaaatgtgtttcgtatttagtcgtcaccggtacatgtaaaagacttgaagaaggttgaagagtcaatcgtttaacaaagggacctatctcttccaataaagccaacgtttcttctaaatttactgcccagatatttcgaccattaacaattcctgcaaataattctttttcgcggaatagaccttgcttaacagcagctaaattttccgccctaccatgtataaaatcaaggccaaatcccgttactggcagcttagagagtttatctaaacagactgctgattcaaagtaggtttgaaagatgaagtgggcttgtggtacttctcttgcaaaaaaatcataaacagacttagctatatctactaaaagttcaccttcatcagttacaaatatcggctcatcaatctgaatataggtggcgcctgcatctatcagatcttgaaagacctgcttataaagtggtaataaccgctgaacagtcgcttcaaagtcgacaattcctgatgataaggaaacataggttattggaccagtgataaccggctttgctttatcaccaactacttccctagcttctagataaagatcaagtaagtaattattctgcaagtgaggtttagtctcaacctcccattctgggactatgtagtggtagttggtattaaaccactttttcatagatgatgcgacattatctttatcacctcttgcaatagcaaaataaaggtctaaattcctctcatactcatcgaaacgctttgggattacattgaattgaaatgacaaatccaaaacatgatcataacaagaaaaatcccccactggaataaggtcaatacctgcctctttttgtttctttaaatgattgatacgtaattgttttagttgtttttctaaatctttttgttcaagattccctgcccagaaagcttcgatcgcttgcttccattcgcgctgttcaccaagacgtggataccctaaatttgaaacttttaccataatttcctccatcaagttatagctaataactaacccttttagttttatgaattattttagtccatgaaaactataatatcaatagcttttaatattttatatttttagcgatttatatagttttaaactatataaaccactatggacctttttataaattttaaaacagcagcatgtagatatctttaaaaagcaatcttacaatcaactcatattatcaagatacagaaaaatctgttgatattattaacaattagtcaaactattacacatcggctatcaaaagttcctgtctagacaaaaacacaaaaaacgtatctagaaatagatgcgttttttgtgtttttattaatcttccattcctacacgttaaaatagtaatctcaataaagccatagtaacgataccagtaagaacagtgtaaaataaatttcgatatcgaatagtgacaactagagttggtatgccagccaataaatctaaccattttagtgttggcaattgtcctaatttaactgaaaaaaagctagagaatgttagggcaaataaaatagaaagaggaagaaattttaaaaatttcacaagactatttggtagccctttgtattttacaaatatgaatggagcgactcttggcacccaagaaacaacaaaacctaaaagaatagcaagaaaaacggtactatttatcatctaaaacaactcccacactacatccaacaacagtcgcaagcaatactgataaggctcctgacaaaaaagtagctaataagaagtaacttaaacctacagaagcaagaacatatacaacaagtcgctttccatcagataacatcccaaacaactgaaatacaaagagacctataaacatggcgactaatgcaaagtctaaaccaaacatttctggattaggaatagtactccccagtaaagttcctattatcgttgagattacccatgtcaaataactcatcacattattaccatgcatccaactaggcgatacaactttgtgatgtaatgcttctccaagtaaaacgccgtagctctcatctgttattagagttcctatggctaattgattcattaggtgagcagacttgaagatagtagtcgcgtgtaaactcattaacatatttctcaaattaactaaaaatactgtcatcgtaatagtcatcaagtctgcttttgctaataatagcgcacacatagcaaactgagcagatcccccatataccaaggcactcataagaccaacttctattgcagataaatctgatgctgaagcaactatcccaaacgccaagcctattgagatataccctaaagctgtgggcaaggcatctttcactccctctttaaatcctttttccatcatatccccctaaattttcagtatattcagttattatagcacaacggtgattactaagaaagaagaggaatgattatttatctttgccagcaattagactaataaatatcctgtaattattctataaacctttgatattgtagccatatagttggacaatattattattttcatagaatgatttttaaaaaatgctttaggtacggtcttaaatttaccacaaaataatttgtaatgaaaattcagaaaattgtagaaaattttgattttttatgttttaatagtttttgtaattattatgttacaagaaaaggagatttttatgaacacaaaacagcgtttttcaatccggaaatataagttaggtgccgtatctgtacttttgggaaccctattttttttaggtggtatcacaaatgtagctgctgattctgtcataaataagccatctgatattgcagttgaacagcaagtaaaagacagtccaacgagcatagcaaatgagacacctactaacaacacgtcatcagcccttgcgtcgacagctcaagacaatcttgttacaaaggctaataatagtccaacagaaacacaaccagtagctgagtctcactctcaagccaccgagacattttccccagtcgcaaatcaaccggttgaaagcactcaagaagtttctaaaactcctttaaccaaacaaaatttagcagtcaaatctacaccagctatttctaaagaaacccctcaaaacattgatagtaataaaattatcactgtccccaaagtatggaacacaggctacaaaggagagggaactgttgtagcaattattgactcaggactagatatcaatcacgatgctctccaattaaatgattcgacaaaagcaaaataccaaaacgaacagcaaatgaatgctgctaaagcaaaagctggtataaactatggaaaatggtataacaacaaagtaatctttggtcacaactatgttgatgtcaatacagagctaaaagaggtgaaaagcacttctcatggtatgcacgtaaccagtatcgcaacagctaatcctagcaagaaagatacaaatgaattaatctatggtgttgctcctgaagcacaagtaatgtttatgagagtcttctctgatgaaaaaagaggaactggaccagccctttatgttaaagctattgaagatgccgttaaactcggtgctgacagcattaatttaagtttaggtggagctaatgggtctttagttaatgccgatgaccgacttataaaagctttagagatggctagactcgctggcgtttctgttgttatagcagcaggtaacgacggtacatttgggagtggagcatcaaagccttctgctctttatcctgattatggtttagttggtagtccatcaacagctcgtgaggccatttctgtagcatcatataataatacaacactggttaataaagtcttcaacattatcggattagaaaacaacagaaatctcaacaacggattagctgcttatgcagatcctaaagttagtgataagacctttgaagtagggaaacaatatgattatgttttcgtaggaaaaggaaacgacaatgattataaggacaaaactttaaatggtaaaatcgccttaattgaacgtggagatattacttttacaaaaaaagtcgtcaatgctattaatcacggtgctgtgggagctattatctttaataacaaagctggggaagctaatctaacaatgagtttagatcctgaagcaagtgctattcctgctatttttacccaaaaagagtttggagatgttttagctaaaaacaactataaaattgtatttaacaatatcaaaaataaacaagccaaccctaatgcaggtgtcctatctgacttttcaagctgggggttaacagcagacggacaattaaaacctgacttatctgctcctggaggctctatttacgccgctatcaatgataatgaatatgatatgatgagtgggacaagtatggcttctccccatgtcgctggtgctactgctctagttaaacaatacttattgaaagaacatccagaacttaaaaaaggtgacattgaaagaactgtcaaataccttcttatgagtactgctaaagcacacctaaacaaagatacaggcgcttacacctcaccacgccaacaaggagcaggtattatcgatgtcgcagcagcagttcagacaggattatacctaactggtggggaaaacaactatggcagcgttacattaggaaatattaaagataaaatttcctttgatgttactgttcataatatcaataaagttgcaaaagatttacactatacaacctatttaaatactgatcaagttaaagatggctttgtcacattggctcctcaacaacttggtacatttacagggaaaacgatacggattgaaccagggcaaacccaaacgattacaattgatatagatgtttcgaaataccatgacatgttaaaaaaagtaatgccaaacggctatttcctagaaggctacgtacgttttacagaccctgttgatggtggggaagttcttagtattccttatgttggatttaagggagaattccaaaacttagaagttttagaaaaatccatttataagcttgttgctaacaaagaaaagggattttatttccaaccaaaacaaacaaacgaagttcctggttcagaagattatactgccttaatgactacaagttcagagcctatctactcaacagacggtactagtcctatccaattgaaagccttgggaagctataagtctatagatggaaaatggatcttacaactagatcaaaaaggccagcctcatctagccatttcacctaatgatgaccaaaatcaagatgccgttgcagtgaaaggtgttttcttacgtaatttcaataatttaagagccaaagtctatcgtgcagatgatgttaatttacaaaaaccactatgggtaagtgctccccaagcaggagataaaaattactacagcggaaatactgaaaatccaaaatctacatttttatatgacacagaatggaaaggaaccactactgatggtattcctttagaagatggaaaatacaaatacgttttaacttattactctgatgtccctggctctaagccacaacaaatggtgtttgatatcactttggatagacaagctcctacactaacaacagcaacttatgacaaagatagacgtatcttcaaagctcgtcctgcagtagaacacggggaatctggtatctttagagaacaagttttttacttaaaaaaagataaagatggtcattataatagcgtcttacgtcaacaaggagaagacggtatccttgttgaagataacaaagtatttatcaaacaagaaaaggatggtagctttattctacctaaagaggttaacgatttctctcatgtctactatactgttgaagattatgcaggcaatctagtatcagcaaaactcgaagatttgatcaatattggcaataaaaatggtttagtaaacgtcaaagtgtttagccctgagcttaacagtaatgtcgatattgatttctcttactctgtcaaagatgacaaaggtaatatcatcaaaaagcaacatcacgggaaagacctcaatttattgaaattgccttttggtacctatacgtttgatctattcttatacgatgaggaacgagcaaatctaatcagtcccaaaagtgtcactgtaactatttctgaaaaagatagccttaaagacgtcttatttaaagttaacttactcaagaaagcagccttactcgttgaatttgacaagcttttaccaaaaggagcaacagtccagttggttactaagacaaatactgttgttgatctaccaaaagcaacttattctcctactgactatggtaaaaacatacctgtaggagactatcgtttaaacgtaacgctgcctagtgggtatagcactttagagaacttagatgatttacttgtatccgtaaaagaagatcaggtaaacctaacaaaattgacgctgattaataaagctcctctgattaatgccctagcagaacaaactgatattattacccagcctgtgttttataatgctggaactcacttaaaaaataattacctagctaatcttgaaaaggcacaaactttaattaaaaatagagtggaacaaacaagtattgataatgctattgctgctttgagagaaagtcgccaagctcttaacggtaaagaaacagatacttctttactggcaaaagctattttagctgaaacagaaatcaagggaaactatcaatttgttaatgctagtccattaagccaatcaacttatatcaatcaagtccaattggcgaaaaaccttctacaaaaacctaacgtcactcaatcagaagtagacaaagccttagaaaatcttgatattgctaaaaatcaattaaatggtcatgaaactgattactctggtttacaccatatgataattaaagcaaacgttctgaaacaaacatcatctaaatatcagaacgccagtcaatttgctaaagaaaattataataaccttatcaagaaagcagaattgctgctttccaatagacaagctacacaagctcaagttgaagagttattaaaccaaataaaagcaaccgaacaagagcttgatggccgtgatagagtttcttccgcagagaattatagtcaatcactcaatgataatgactctctcaataccacacctatcaatccgccaaatcagccccaggcgttgatattcaaaaaaggcatgactaaagaaagtgaggttgctcagaagcgtgtcttaggggtgactagccaaaccgataatcaaaaggtaaagacaaacaagcttcctaaaacaggcgaaagcactcctaaaataacctatacaatattgctatttagtctctctatgctaggtctggcaacaatcaaactaaagtctatcaaaagagaataaaatactttaaaaaatagagcaaggcatcaattactagctattaatagttagtgactggtgcctttttgaggagcttaaaatgatgttcctaaagaccttttctctgcagtatcttggtttataacaccataacacttcaaagaatgggaaaaaaactctttttttgttatatttgatatgacataaacagctagctaaaagtcaaattataactatgggtattgaggtatacatgacaaaaataatttatttcgctgatgatgaaaagaatattcgtgacttggtggttccttttttagaacatgatggtttcactgttcgagcatttgaaactggagaccttctcttagaagcctataaaaaccaaaaacccgatttagttatattagacataatgatgcctggaactaatggtttagatgttatgaaaagcatccgccaatatgataatattcctattatcatgttaacagctagagattctgatgttgatttcattacggcttttaatttaggaactgacgattacttcaccaagcctttttcacctataaaacttagtctacatgttaaagcattgttcaaacgccttgatgaaaaagcaatcaaaaatgacactcagtatcagttcctagatttaactctggataccgaaaagcgaatagccctattatcaaatgaagaaatgcccttaaccaagacagaatttgattttcttttagtattaattgaaaaacctgaaactgctttttctagggaaacactgcttaatcgtatttggggatttgatgatattgaaagcagagcagttgatgacactattaaacgattacgtaaaaaatttaagcaataccacagtcaggttagtatcaaaactgtctggggttacggcttcaaattaatcaaagaggacaaatgaaaaagaaaagtttaattagcaatcttatccttattaatagcatcactctatttcttggtttttacctcatctatttttctgtcaactatgtcattaaagactatgtccatcaaatgacaaggaattccatgcaggcgaatttcaccattttagatagtatctataacaacaagaaaataccagatgaaaatatggttaaccaagatagcatctttgtttggtcttactatgctatttttgaccagcattatcgtatgaaatatggcactgataatcataaaaaagagagccatgatattattcgctatcttacccaaaaaagattgtggcaaatttctaaggaaaaagatggtatgtttgtaaccatcaagaaaaaaacctattatgtaatgaccaaagactactctggtatccttgttgatggtagcataaaaaaagttcctaaagcacagtcgcaactttttcatgtgattaacttttcagacattacttacacccagcatctaattactaaaattaatcattttcttatagttatcttagtactaacctatattcccatgctatttattatgaggaagactttcactggaattagagaatctattcaatcagtacaaacttatatttccagcctttggaaaaatcaaggcaatcatcaatctagtcaaaaagaaattgtcttttctgatttcgatcctcttctacttgagagccaagaaatggcaaatcgaatctaccaagcagaagagagccaaagaaacttctttcaaaatgcctcccacgagttacggacacctttaatgtccatccaaggatatactgagggagttcaagagggtattattgatgccgagctcgcacactctgttattctgcaagagagcaaaaaaatgaaacagctcgtagacgatattatcttactctctaaattagatagtaacttaagtgatcaaaaagatgaattttctttaaatgaattacttaatagtattattgcttatttcaaacccctagctaataaacaaaagattagtattacttatagaccagacaagcatgaaaagttactaaaaggtaacgaagagttgattcaacgagctatcaataatatccttagtaacgcactacgctatgctgtttctcatattgaaatctcttacacaaatcaaaaactaactatctcaaacgacggaccagccatttcaaaagaagacttgccttatattttcgatcgcttctataaaggacatggcggccaaacaggtattggacttgcaatgactaaagaaattatcaagcaacatcatggtaatatcatcgctgagagtgattcgacctcaacaacttttacgatttatttcaattgccacaaaattgcctaacttttcctacaaaaattcaaagaagttattgcttttttaacctataatacctatagatcaaaaagttattctaaaagaaagtgagtttttatatgttacattctaaaaaaatacattccttatcgcttattgccgttctctctttagcaacatatacgagtttacaaccaaatcatgtaacggctgaacaatcacaaaaaacatcaactgttcatatgagtcaaaaaactattgaacataagttaaaagttgcagataaagaagctgctcctctctacgctaaaatcgaccatatccaacgacatattgaagtcaaaaaagcaaaagatttaaaagttattgaattgtatattaacaaagatatcaaccaactagagaagcaaaataaacgtctactaactaaattctatacttctattgataatcaaacatgggatagcacaagtgaagtcaaaaaattgattgataagacaaacctatccactaacgaaaaagatagattaaaattatattttgaacaacgtgcttaccttgagacaaggttgaacgaccgctatcaaaaatttgataactctattgaaaaccaaaataaagaactaaaaatattaacgtcaaaaatagaaaaaatctatcaaaaacatggtattacaaaagaggtattaaaaacttactatgctaaaaaaacagtacgagctgactgatttagctaaaaatagaaaaatcccaaaagttaaacttttgggattttatacgcgtaaatatcactatttctagtaaaatctttatcttatttcaccacaatattaacgagtttgtttggtactgcgatgactttgatgatgtctttgcctgcgatttcggcttggactttttcgttagcaagagcaagatcttgcaattcttcgcgtgaaaggtctttagcaacgacgagtttagctttgaccttacctttgatttggacaacgatttcgatttcgttttcaaccaatttgctttcgtcatagcttggccatggcacgtaagagattgactgtcctgaggctgtcaagacttgccagagttcttcacctaagtgcggtgcgaatggtgcaatcaattgaacaaagcctttggcatagtcgctaaagagtttgtcttccttgttggctgcattgacaaagaccatgagttgagcgatagctgtgttgaatttcatttggtcaacttgctcagtaactgccttaacagtttcgttgtaaaccttgtcaagagctccgctattttcctcagtgatctctttagtcgtgatcaaacggtaaacacggtccaagaacttacgtgagccttcaagaccttcttcagaccaagcgattgaagcatcgagtggtcccatgaacatctcgtaaacacgaagggtgtcagcaccgtactgctcaacaacatcatctggattgacaacgttcttaagtgatttagacatcttagcaggtgcttgttcaagctcttcaccagtttccacatggaagaagctgccatcacgtttttcaaccttgtcagttgccacaagagcaccacggctgtcgcggtagcttgttcccaaaatcatcccttggttaaagagtttttggaatggctctttggtaggtacgacaccgagatcataaagaaccttgtgccagaagcgagcatagagaaggtgaagcacggcatgctctgcaccaccgacatagatatcaactggcaaccattgtttgaggagttcctcgtcagctagtttttcagtgttgtgtggatcgatgtagcggagatagtaccagcttgaacctgcccattgtggcatggtgttggtctcacgacgacctttaacgccatcttcacgagtgacttccaaccagtctgtcaagttagcaagtgggctctcaccagtacctgaaggacggatatccttagtaactggaagaactagtggcaattcgctctcaggaaccgcagttgatgttccatcttcccagtggatgattgggattggctcaccccagtaacgctgacggctgaagagccagtcacgaagacggtaagtaactttctcattaccaacaccttctgcttcaagccactcgaccattttggcaatagctgccgctttgtcgagaccatctaggaagtctgagttgatgtgaagaccgtcttctgtaaaggcagcctcttcaacattcccaccttcaagaactggaatgatgtctaggttgaattgttttgcgaattcccagtcacgttcatcgtgagctggaactgccatgatagcacctgtaccgtagctagcaaggacatagtccgcaatccaaactggaatttctttaccattaactgggttaatggcataggcacctgtccagacaccagttttttctttggcaaggtctgtacgagcaaggtctgatttgagactcgcttgacgtttgtattcggcaacggcttctgcttggtcagctgttgtaatagcatcaaccaaggcatgctcaggagcaagaactgcgtaagtcgcaccaaaaagggtgtcaggacgtgttgtaaagacagtgaagtccttatctgtatccttaaccttgaaggttacattagcaccagttgatttaccaatccagttgcgttgcatgtccttgattgactctggccagtcaacttcttccaagtcttccagcaagcgctctgcataggcagtgattttgagcatccattggcgcattggttttctgacaactgggtagccaccacgttctgatgtaccatctggaagaacctcttcgttggcgatagctgttcccaattcttcaacccagttaactggaacttcagcttcgtaagctagacctttttcataaagcttggtaaagatccactgtgtccacttgtagtagttagggtcagttgtgttaacttcacgatcccagtcgtatgagaaaccaagagcattaatctggcgtttgaagttagcgatgttttcagctgtaaactcagctgggtcattaccagtatccatagcgtactgctcagcaggaagtccaaaagcatcccaacccattgggtggaggacattgtgaccttgggcacgtttgaaacggctgagaatatccgttgctgtatagccttctgggtgaccaacgtggagaccagctccagatgggtatgggaacatatctagggcataaaacttaggttttgatgcgtctgttcctgttttaaaggtatgattatctgcccaaaaagcttgccatttgggttcgatttctttgtgattatagaatgtcatcgcacttctccatgtcaaaaaagtatagtcttcttattataacacgaaaaatagcaataaaaaaggtgaaaataccctcaacagcaggttctctccccacttatccttgacaataaactaaacttactctatactatttccaaatgacataatgctttaaccgtgtcctgtgagacatataagcgaccaaaataggattctatacagaaatcctactatttttgcgagcgtttatagaactcaagggtagcagcttgagttttttcttttacattataatgagttgaagcagctatgacatctctgttttagaattttttctattgacagtatttaataacggtggtctgtgagccatcattaaaggaggagacttatgtcaccattaaatatcaataagaataattggcgcgccctaatcgctgccattgtcgcatccggaaccgatgatttaaatatcatgttccttgcattttctatgtcaactatcattactgatcttcatttatctgcggcacaggctggttggattgggacaattaccaacttgggaatgctcgtgggaggactaatctttggtttattagctgatcgctacaataaatttaaagttttcaaatggacgattctaatcttttcaatcgcaactggtttagttttcttcactactaatttatcatatctctatatcatgcgcttcattgcaggaattggcgttggtggcgaatatggtatcgctattgccattatggcaggaattgtcccaactaataaaatgggccggatttcttcactaaatggtatcgctggtcaagttggatctattagctcagcactcttagcaggatggctagctccagcactcggttggcggggactttttctctttggccttctccctatagttctcgtcctatggatgcaatttgctgttgatgataaagatatcttagatcaatataatacagacgcagatgatgaacctctagatatcagtataaaagctttatttgatactcctgtattagccacacagagcctagcactaatggttatgacaactgttcagattgccggatactttggcatgatgaactggttaccaactattatccaaaccaacttaaacgtttctgtcaagaattcatcattatggatgattgcaaccattcttggaatgtgccttggcatgctagtatttggtcaattgttagataaatttggaccgcgtttagtatacgggtgtttccttctatcatctgcaatttgtgtctatctctttcaattcgcaacaacaatgccttctatgattataggcggggcagttgtcggattctttgttaatggtatgtttgcaggctatggtgccatgattacacgtctctatccacatcatattcgttcaacagctaacaatcttatcttaaatgttggtcgtgcaataggtggcttttcatctgttatcatcggaatgattctagacgtttcaaatgtctctatggtcatgcttttcttagcaagtctctatatcgttagttttttatcaatgctaagcattaagcaattaaaacgtcaaaaatatcacactaatttaacacaattagatgtcaaaccaactgactgatattacaaaacagtattcctcaattgagaaatactgttttctttatttcattagataactattcagctcaggcatcacacttttagcatctttcataccaagctgataaatactatcaagtttatccggattcttctctaagcggccaataaccaagctcttactcggtctaattgcaaatagatcgcctgttttttcaaggctcatgaccttttcaagactattattatactgttggtaccgattcgaggctgtctttacaaaattaggatatttcctatacagagttttatacaatcgtccacttgaaggctttttctgataattgagcggcctagtcatcacaacaatcaacttgtcaaatcctaaaccacgggcaaaatcaacgggaatactatcagataaaccaccatctaagtactttttcccctgccaatcaaccatctttgagactactggtaatgctgaactagcacgtaaaatttccatttgttcaaaaacactatcaattttaaaatattcaggtttaccagatgtcatctctgtagcaactacgtaaaaatcaatacttgattttttaaatgcttcatcgtcaaatacatccaatttcataggaacttcataataggtgaaatctttattaacaaaattccctgttcgaaaccatgaccttagactcatatatttagggtgggataaatactttttattgtatcgcaaagccctctctcgttgtctagatacaaaattaacaccaaacaatgcaccagcagagacagatacgataccatctatttttattcctgcatctagaaaagcatctaaaactccagcagtataaagacctctcattccgccaccctctaaaactaaaccaacagacaacataggcaatcactttctaatattgatatttgattaaagtatagcaaaatatagctgttttttctgaaaaagaatatgttgtactatataaactccataattaatttaataataatttctgaatcacactcacctatgatagaataatactaatagtttttaaatttatatttactatatctaactaatataaataaaggattttttatgacttatcaaaaaacagttgttttggctggtgattattcctacattagacaaattgaaaccacattaaaatctctctgtgtctatcatgagaatctctcaatttttatttttaatcaagatattcctcaagaatggtttttagctatgaaagatagggttggacaaactggaaatcaaattcaggatgtaaagctcttccatgatcacttatccccaaaatgggaaaataaaaagcttaatcatattaattatatgacctatgctcgttatttcatacctcagtacatctcagctgatacagttttatatcttgactctgacttagttgttactactaatttagataacctctttcaaatttcactagacaatgcatatttagctgcagttccagctctttttgggcttggatatgggtttaatgctggagtaatggtaattaacaaccaacgttggcgacaagaaaatatgactattaaattaattgaaaaaaatcaaaaggaaattgagaatgccaacgaaggggatcaaacaattcttaatcgcatgtttgaaaatcaggtaatttatttagatgatacctacaattttcaaattggttttgatatgggagctgctatcgatgggcataaatttatttttgacatcccaattaccccactcccaaaaattattcactacatttcgggaatcaaaccttggcaaacattatcaaatatgagactccgtgaggtatggtggcactataatttacttgaatggtcaagtatcatatctagtaaaaaagtatttggtttagaccacccaattaaaacacaaaattatcgtctcaatttccttattgttacaacttctgattgtataccatctatctcagaattagtcactgcccttccagattgtctatttcacattgcagcaccaacagttatgtctgacattcttataagcctattagcttttgaaaatatccgccttcataaaacttacactccacctattattgataaattattagcagaagctgatatttatcttgatattaatgtttttggaaaaatggagggcattctacagaaaatgtcacaatctgaaaaaccaattcttactacaagagaatgcaatagccagcttgttccagaaacagtttttgcatctatcgatgatttaattaattatcttcagtctatataaaaaaattggcatccattcactatatacccaacattattctaaacacttaactaggagaatttaaatggaaaaagcagttgcacttgcagttgattcaaactacttggataaagccttagtaacaataaagtctatttgtgtttataatagaaatataactttttatttattcaatcaagataccccagttgaatgggtacgtaatataaacaggaaactagagcctctaggatcaaaactgattaatgttaaaatatataactatgatattgctcatctaacgacttttctaactgttagtacatggtttagattatttttagcagattatatacctagttcacgtgtactttatttagattcagatattatcgttaacactaatcttgattacttatttgaactagattttaaaggttattacttagcagccgtcaaagatccccataaaaatgaagaaggagggtttaatgctggcatgcttttagctaatctagaactatggcgggaagatgggctcactaaaacattactaaaaacagctgaagaactccaccgagttgtcaaaacaggggatcaaagtatcttgaacattgtttgccataatcgttggttatctctgaacaaaacatggaactttcaaacttatgatgtcgttagccgctataatcatcgatcttatttatatctaaacatagaaaatagaactcctaatattatacattttttaactagtgacaaaccttggaatgaaaatagcgttgcaaggtttagagaactatggtggtattacttccaacttgatttttgccaattaaccggcaagcaaagaaaagtgatttcttacgaaaagtccatggaattgctttctgtttcagatattcatcttttcactcttacatcttccgataatttagaacacattgaatcgctaatttgtagatgtcctactgttcaattccatattggtgcctacacaacagtgtcaaataaacttagcaaactagaacaatatccaaatgtcctagtttaccctgaattaattgaggcaagaattgaaaaattaataacattagccactgcataccttgatattaatcatggtccagaagtaggtaatattttacaaagagttcatttgaaacaaaagccaatttattctttcaacaacacgtctcatcaagagaatataaccaaacatatcgttaatcataattctattgataatatggttgttttaattaacgaattaaacctaaatcaattataaattaacaaaaatccatctttattttaagatggatttttcagaagttttataattctgcaacttggtacaactcaagttctgcttgtgtttctgagccgaacatgttgatcattaatttaactttgttattctcaatctcaactacacgtccttcttgtccgatgaaagcaccatcaatgatttgaacaacatcaccttccttgatattagtatcaaagacatcaacggtttgtcccattgagatgagtattgaacgaatctcttcttctaacaacggtgttggtttagagcgattgccgtgtgatccaacaaatccagtaacgtttggagtattacgaacaacaaaccaggcttcatcagtcattaccatttccacaagtacataacccgggaagcgattttcttcaatttcttttgttttcccatttttctcaacatttacagtttgagtagggatttccacacgcaaaatgttgtctaacatattataagtttgcgcacgttgcaagagattttcctttactttattttcataacctgagtaggtttggagtacaaaccaacccttatcaaaagaatctaacataagttttcctttccttaataaaaaagccttttacggcttattggactgctattttcaatatatattataaagaaaataaaataagctgtcaattaaagtaccgactaaatcattctaaaattcaaataaaaaaggcaaagttctgatgaggtttgccttaagattttgaaaggatagacctttcggtttatgtttaaaaataaatttaattttttttatgctttaaaactatcgtaataagacctgcacttaacataacaattagtgatacaattgctaagagtggacttgcggcttcacccgttgatggtaattttttactatactttttgttttcaatagcttttttagccgccaagtttccgctagtattaaccgattttttggttgctggtttggcctctggtttagcttctagcttagcctctggtttagcttctgacttagcctctggtttagcttctggcttagcctctggtttaacgtctggtttagcttctggcttaacgtctggcttagcttctggtttggcctctggcttagcttctggcttagcttctggcttagcttctggtttggcctctggcttaacgtctggtttagcttctggcttaacgtctggtttaacgtctggcttatcctctggtttggcctctggcttaacgtctggtttaacgtctggtttaacgtctggcttagcttctggcttaacgtctggtttggcctttggtttaacgtctggcttagcttctggtttaacgtctggcttagcttctggtttaacgtctggcttagcttctggtttaacgtctggcttagcttctggcttaacgtctggtttggcctctggcttaacgtctggtttggcctctggtttggcttctggcttaacgtctggttttttatcttctttagtacctctggtaaggtcttgaagttcttttaaaagctttttgacttcatcaagcattttttttgcttcatcaagtccactttgaccagtccaaacactcctatttccgaaagtttgtttatctctaaacctattcaaataagttcccacagagtctgcataatatccaggtgtaggcaaaatacttttatgcttttcataaatttctttagcctttttagataacgctaatccttttgaacttattctttcaatttttttagcatactgcttttgtaagtttttctgggcaacttcctgtgctgcttgcttaatactatttaaagcattcattgcagcagtaatattgagcttaccttcattatactgtttcactacattatcaattgcagtattatatctcaacatttcatcgttagataaattttctaacttagcaatttcttgctttttaccattggcctgatttaccaacgtttctttattggaattaacaacttttttagcttctgctacaaactcatcaacttgactcttagtgctagctctttgaattttttctttatattcttctaagacttcggggcttatattttttattaaggccacgtcattttgagccatttgcttagcttttgttgattcagcattattcagttgcgtggcttgagttacaaatttaagaataagttgcgaatcttttgaagagctaatagatttaactaaaatatctttttggtctgatgaaaggaaacctaatgacttaatgatatcttgagaacgtcttgactgcttacctagttcttgatcactaactttagcatgtgtagttacacttggtttattttgcttaccaatttgtccttgatataaaatatttctaatttctgcttcagtactattaattaattgtggaagtgtatcctgtgatgctctattaaaatcatttactctacttaaaagtatagcaatagctttgtcattaccacgatatttagaaatcaaattcttcagagtaaccgcccctaaattaacttgtttcttatgaggaattgaagccgatattcctgaactagtatccgcgtgtacaataccactacatacagcaaacgctgctgacattgaggccaaaccataagctgtttttcttaaaaagtattttacttttttttcgttattattcatattcgctcctttatatagttagttgaaaatcctaatttattaggataggaccacgtttattttaatttaatttgagttccttaactaattatataacttggagttttttatttcaacacttttctttaatttatttacattttattaaaataaacatcttttttttaatgtttttttgctcaacaatctagtaaaaataatcaaaagattatttttttataatttaatcggatatatatgttattttccacacaaaaaacccttagtaaaatctaagggtttgggttgtttctatctaaaataatctattattaaaatcgattaatcaagtccatgactcctgcggctaacagtttgtcaaagatgtagataacgattgtgaaaaatacagtgtattccaagatggaaataaaatctttccaacgttgttttcgatttggccaagtagtgtcacgcaatacttgaaaaatccctttgacaaacattatcagttctcctttttgcagtttgttacgctatatcaacgcgtttctttgtgtattgtatacttcttacaatatttacaaaatttatttacttctagtcgtgttggcttgggggtgctacttactccgattgagtaatttcggcttccgcattctgtacacgctaggcttgctttcttttgtgccataacgcctccataagtgctattttaacatgatttgtataatcctgcaagctatctaaagtagtcctttagactattccaagcatcttttaccttctcttggaaatttgaatcttccaccgctctagaaatatcttgtgcagccttacttgccgaatcttttaaatcattaataattgagcgtgattcttggttcgttgtattactagcatcttgtgcattataaactgaaccaataccgttttggaaataagcattctcaatatgagtaaaactagaccccttagtatacggtagtatatatgaagcttgcgtgctaaatatatttgaagctgtacctgcactagaatctgtcaaataatggtgtttatctgtgttcttaaagccaacccattgactaataacgacatcaggcgtatagccgactacccactggtctccagataaattggggttaaaatctgtttcggttgttccagttttacctgccattgtataaccataaacattggcattaatagctgtaccatttgagaatgttcctaacatcatactagtcattttactagccactgagcgactaataactcgcttaggcttatctgtaaattgctttactaattttccattagctgtctcaattcgagtaatcaaatgagcgcgatgcattataccgtcatttgcaaaagttgagtaagcttgtgccatttctaaaggattagtggttacacttccacctagcgccactcctagctctttgtttgctgatgacatatttagaccaaacttcctgccataagtaaaggctttattgattcctagtttgtctaaagtataaacagcaggaatattataagaattagctagtgcttgatacatcgggatactttcagtctcaatcccaccatagttacttggtttataaccatgaaaatcttgaactttattaggaagttctttatctattgaccatcctgaagcaatagctggtgaataaacaactaaaggttttatggttgaggctggacttctctttgattgagtcgcgtagttaaaacttctaaactgtgcatctttagtactttgaacacgtccaactaaacctcttacaccaccagtttttggatctaaagctacgctagcaccttgggcagattgaccatcatagtcagatacagggaagaggctagtatcatcaaatgttttttgcattcctgattgataattttgatctaatgcagtgtaaatcttatagccattattgacaatatctttttctgaaataccataagtatcaatggcttcattgacaacagcatcaaaataggatgggtacctgtaatcattaattttaccagcataggtatctgctaatctatttttcataccaattgaagcagcttctttagcttgagacttggttagtttacctgcatcaaccatcgctgccaaaacagtatctcttcggttagttgcattttcaacagaataataaggattataaacttctggtcctttaagcattccagcaagtgtagcagcctcatctactgtcaaattagcagcactggttccaaaatatttcctactagcatcttccacaccccaaacaccattaccaaaataagagttattaagatacatggtcagaatctcagccttgctatatttcttagtcaattctagcgctaaaaagaattcacgcgccttgcgtttaatcgtttggtcctgtgacaagtaagcattttttgctaattgctgggtaatagttgagcctccgccaaatttcccaagtgtagctactgccaaaaaaaatcgcttaaagtttacaccattattttcataaaaagttctatcttcagttgctataacagcatttttgagatgatcagaaatagcatttaactctacataagttcccttttgtcccgaaagttttccagcatattctttattcttatcataaatggtggtggttgtttttagagcactctgtaaatcactaactgtagcagttttagaaagataaaaaagatagctaccaaatataagaataaaagccattaaggcgataaaaagcaacttcccaatacgatagcgccgccaaaaacgacggataggatttttaggagaagggaggtaacgatcaactttttgtagccattcaggtcgagatttagcattttccttttggtgacgaatgcctcgctgatactgggatttactaggtcgggtaatatcatcaatatcatagacttcttcgccatccaaattgctagtttcttctctagtttcttgttcattttttcttgtcatttcgtcgttgtcttcatcaacacgaaataagtctataaacttatcaaataatttcatagacttattatatcaattttcaataaaatgctataataaaaccatgtcattttcattaaaaattagaaatccatacggtgaacataccgttaaagaactccttgaagattattttttgattccacgtaagattagacattttttgcgtgttaaaaaacatgtacttataaacaatgaatttattaattggcaaactgtcgtccaagaaaacgatactattaccttaatctttgatgatgaggattaccctactaaaaaaattcctctgggcagagcagagcttattgattgtctttatgaggatgaacatcttattatcgttaataaacctgaaggtatgaaaactcacggtaaccaaccaaatgaaatagcactgttaaatcatgtatctgcctattctggacaaacatgctatgttgttcatcgcctagatatggagaccagtggagctgttttatttgctaaaaatccatttatacttccccttatcaatcaacgcttagaacgaaaagaaatttggcgtgaatattgggctttagttgaaggaaaattttcacctaagcatcaagttttgagagacaaaattggacggaaccgtcatgacagacgtaaacgaatcattgattctaaaaacggtcaacatgctatgacaatcattgacgttttgaagtatatccaaaatagtagtctcataaaatgccgactggaaaccggaagaacccatcaaattcgcgttcacttatctcatcatggacatcccttaataggagaccccctctacaacccttcttctaataatgaaaggttaatgctacacgctcaccgattgactctatctcatccattaacttgcgaaactattagcgtagaggccccttcatctactttcgagaagattttaaacaattataaaaaaggagttggataataattatccaactccttttaatcattattgcttagttaatggcttactgagtagtggtttatggtaatcaaattctccatcactagatgtctgccagatcactgggatgatcttattcccttcaatttttattccataggcgtatttaactttaagaccaccgatacctcctgttacaaaagttgtagtatcagtacctgattcatattgataaaggtagagcccatttcccttatcctccaacttcgtaactttagcagaatggttactttccttagatttactatccttgtaaacttttttctgagtaactttaccatccttatcaaaagtcatcgttactgtaccgtcctcaacttcacctttccaacttcctacaaggttctctggaaaaatggaaacgggatcagccttaactttattagtttccttagctactgtgatatcttttttaccatcattagaaataaggtaactatttcccgattttttcataataaaattaccagttaaattctgaataatgtggccatatgttttcttatcaggatctgttgatttatcataattaaaatcataatcggcagcaaaattaacttgataactttctttcccaacctgtgtcattttattaaggacaatattaggaatagtgaaatggctcgctttacgattatcagttacaaattttgctttaatactttctttcaatcctttgtaaaaatcattttcggcacctttttcaaaaactgttcctaaagtctgagggtcttgcccagttgatacataaagtatcaattgattgaaagcagttatcaatttctgtccagcttctttttcatttaataaaccatcaacatctaatttgattgtctgattatcagcgatagagattaatttttgtttatgagaggttatctcaccatcattaaaaacttttttgatataagcttttgaaccatcagtcactggataattctctacggaatggctaccatcttttaatttagcaatacgattatcaccaaaataaagattaccatccataagattacttgttactgtaaaagatttaaaagcgaccgataaatcaatagtttggtttttaccatcataatcttttttgagtttaatctcttttccgtcactagtcccttcaaggctagcagtataatgggttctaggtaaacgttccaccgttactgaaaaatgatctgaattgcttgtcgcgacctttttttgattcaacaaaacatccaatttaggaacattggttttcaaggtcaaagacataggcttattagcaatacgataatcagggaatatacctaagcgactacctacacgctttagatacattgaatcatttttgtttccttcttttatttcctgccctaatttacgcgcctcacttttagacaagggctcaaaattagcgtaattggcctcatcatttgtgatagattctcccgtatctgaccaaaccatgtattctttaatattatcaaacgcttgacctgacgtacgagaacgtgctgctacaaaacgactaagtacttgtccctttgaaaaataaaagaatcctagactcagaagtgatactaaaactataccaaaaataactaagcacactttaacaacttttttcttaaaaaaatcaaacataccttatcctctcattcactttatattaaagtaaattgcttaaagaaaagttacaacactgataaaacagctgtatttgtacttgtaaccgctatttttctattataacaaaacgaaaaaaggattgaaaccataatccgatttcaacctctaaaatttttgtctatgattatactaagtcctgcaagaagctttctccaatcatcgcagtatcaacaccaaagttatccgcaactgttgctgaaatatctgcgaaatgccctactgggataagtccgtttcctgtgaaggatgggctataggctaagagaggaatgtattctcttgtatggtctgtacctgcataagttgggtcattaccatgatcggcagtgatcaaaagtaagtctttgtcacgcattgctgaaatgatctctggaagacgctcatcaaactcatgaagacaatcacgataaccatgaggatcacgacggtgaccatagagagcatcaaagtcaaccaaattagtaaaggagaagcctttttcaaactctgataaccccattgtttttatcaaagtatcaataccatgactatttgatttgttatgtcccatatcatgattaatgcctgaaccattgaaaatatcattgattttaccaacagcataagtatcgatgccagcttgatctagtttatttaatacggtatcttcaaatggtgatactgcatagtcgtgacggttggctgtacgcgtaaagttacctggttcacctacatatggacgagcgataatacgaccaaggagagctggacgctccattgtgatactacgagcatattcacaaatccggtagagttcttctagagggatgatatcctcatgagctgcaatttgtaggactgggtcagctgaggtatagataatgagctcaccagtttccatttggcgtggtccaaagtcatcaataacagctgtccctgaataaggtttattcgcttcacgaataactttacgtcctgaaaaatcctcaatctttgtgataatatcttctggaaaaccattccagaaagtatcaaatggctctgtaatatttaagcccatgatctcccaatgccctgtcattgtatctttaccaagtgatacttcttgtaacttcgtcgcgtagccacttggattttcttctgcagggacggtcttaagcgcttggggacgaggaatattaccaagtccaattttagccatgtttggcaccgcaagtccaactgtttttgaaatgtggccaagcgtgtctgaagcaccatcaggaactcctgcattgacaaaatcattggcatctggtgccgctccaatacccactgaatctaagacaactaagtgaatgcgatcaaattgtgacataacttctcctttatcaattgaaaataggaagtcagaccagcatccttcctatttcctttatattatttaataagtgccttcttcaactttttggttcttaacaatcttgatgatacggctagtacccaagcgtgaagctcctaaagcaataaatttttcagcatcttccaatgatgagattccacctgctgccttaattttaacaccttcgccgacatattttgccatcacttcaacatcttcaaatgtagcacctgctgtcgaaaaaccagtagaggttttaataaagtctgcacctgaacgtgtgacaaccccacaaagttcgataagttcttctttagttaattgacatgtctcaacgataacttttaagatatggtcttgacatgcagccttgatttgacgaatttcttcttcaacagtatcaaaatccccatttttaacatctgtcaaattaatgaccatgtcaatttcatcagcaccatttttaatagcatcttgacattcaaaaaccttcgctgcagttgtactatagccatttgggaacccaataacagtacaaatagctaatttacctgaaacgtactctgctgcttttttgacgtaagaggctggaatacatgctgaagctgtttcataagccattgcatcatctaaaattgtttggatttctggccatgttgctgttgttgctagcaaagtatggtctaccgtttttaaaatatcttttacttccacgttactatccttctttcttttgtcaacttttagaatagagttacaataccgacgataaaggcgctaagcatacttacagcaataccaccaatcattgcacggaaaacaagtcgagctagggtgccacgtttctctggacaaagaacagcaatacctgaaacacaaatacctaaacttgataaattagcaaaaccacaaagtgaaatagttgctaccaatgctgtacgataatctaaagatttgattaggtcacccaattgttggaacgaaacaaactcatttaaaatcaacttacttccaagaaggtttccttctagaagaatgtttttgtggtcaaatcccataagaaaaccaaatggagcaaaaacatatgagaagatttgttctaagcggattcccaatccacttaacatcatattaatcaaagaaactaaaccaacaaaggcaatcaaactagcaccaattgagaaagccatttgtgcacctgtgcttgcaccctcagcgattgcatcaatcacattggcgttattacctttattatccatcttaatgtcatcaattttttgaacaggttctgtttgaggcaataagattttagcaatgagaatactgccaataggaaccattgttgaagcaatcaagagatattccattggaatgcctaatgcaatgtagccaccaagaatagaaactgacatacttcccatacctgataccaacacaaccattatctcactatcagtcatacgacctaggtatttgctaaccaaaattggactgtctgtttgaccaagaaacatattagctacggcaacaaaactctcaacctctgaggatttcataattttaccaacgcccttacctatccattttactacaaatccaaggattcctacataataaagtagactaactagggcagataagaaaacaatattgccaagcgtttgaatggcgaaaataaaaccagtttttgctccactatctgctaatgaaccaaacacaaaatttaatccagcttgaccacagttgattactttagtaactccagttgaaacaacactaacaacttgttgacctagtgggatacgtactaagattagcgcaataatgaattgaacgataagagcttttccaattaaacttagagaaacactcttacgattgaaagaaattgcatacacaattcctaataccaataaaataccaataatactataaataaattgcatgatgacttccaaaacctcgcttattgtgatttatcattttcaataagtgtgcggagtgcttcaacagcaacttgaatagctgcttctgtgtcatgagccattgggttatccatacccaaagcgttgcgttcttgattaccaacaacaaggaaatctgatccacaacgaactcctagatgacttgctgctacaaaaagagctgcagattccatttcagacgcttttgttcccagacgtttccatgcttcccatttatttaataattcataactaactggcatacgttctggctcatgttgtccataaaatgcatctttacattgaactactcctgcgtgacttgtgtaaccaagctttttagctgcattaactagagcattcgttacctccaagtcagctacagcaggaaattcaatcggagcatattctttacttgtaccttccatacggatagctccagttgcaataacgatgtctccgcctttaacatcaaggtcaataccaccacatgttccaacacggataaaggtatcagcgccacagagtttcaattcttccatcgcaatagacgctgatggaccaccaataccagttgaagtaacactgactttttcaccgtttaatgtacctgtataagtaacatattcacggctgtctgctacaagaactgcattatcaaaatgttctgcaatttttgcacaacgttttggatcacctggcatgataacataacgacctacatcacctggacgaatctgtaggtgatattgcaatccgacttcacctgaataattctgcatgataaagacctccttaatgtcttgtctatttttttacacttgtataataacatacaagacaacctttgtaaacgcttttatcgaaagaaaacgttttattttttaacttgatttttctaattttttcaattaaactaacttgtatacggaggttacaatgcctaaaaatgaactaaataataaactaaataaactaaagcatgtacaagtctacaataagatttttaacatgattcaagacggtacttattctcctggaatgcaattaccttctgaacccgaattagcagggcaacttaatgttagtcgagctactttacgaaagtcattagcactattacaagaagaccatttggttaaaaatatcagaggaaaaggtaatttcattagagaaaattctagcaacttgtctgaaaacggttacgaaaatagacaacaccctattaaaacttgtctaacttccaaaattacagaagtagaattagaatttcgtgtagaggttcctgcagaagctatcacagcttcacttaaacaagaaacccctgtagttgttattgctgatcgttggtaccacaccgatgatggaccattagcttacacactttcttttatccctatcgaacttatttcagatgctgagatttctttacatgatactaaacagttgttaaacttcattgaagaaggtatctatcaagaaggcatatcaagccactcacaaagccatttgggatatgcgacatctggcaatttttcagcaactaaatataccctatccgatcatggacaattcatattaatacaagaaacaatttttaagcaagagaaaatactaatgtgtaataagcattacgttcccattgagcactttgaattgtccattacctctcattaaggaggcaagcctatgcaaaatagactattaaaagttgcttttttcataacttttaccgaattaattatgggcctaatagttggcgcttattttaagttaagttattttctagcccctccaaaggaaccgtcaatgggtgctgggtacggaatgctcttttctctgttatttatacttattagttacttaattctattagctataattcaattcttagcttatcaatctcaatctaagataatagcaatcattgttttgctacttttttcctcccactactggcaaatattagatggcctatccttatgatcttcttaccgcaagtggtagtgactatcatatctctattatcacaacataaaactcccctttgttaaaggggagttttatgttgtgataagttagtgattagaagccacccatcatagatggatccattgcaggagctgtaggagcttctggttcaggtttatttgctactactgcttctgtagtcaagataagacttgctacagatgccgcattttgaagtgcagaacgtgttactttgacagggtcaatgatacctgtggtaaccatatctacccattctccattggccgcattaaatcctgtaccaatttcagactgttttaaacgttcaataataactgaaccttcatatccagcattgtaagcaatttgacgaacaggctcttcgagagcacgaagaacaatattacgtccagtctcctcatcaccattaagtttcagtgccgctactttttcaataacgttcacaagagccgtacctccacctgaaacaataccttcttcaactgcagcacgcgttgcatttaacgcatcttcgatgcgaagtttcatctcttttaattctgtttcagtcgctgcaccaactttaattactgctacaccaccggctaacttagcaagtcgttcttgtaatttttcacgatcaaaatcagaagttgtagcctccatctgtgacttaatgatagctacgcgattagcaattgctgatgagtcaccggcaccttcgacaataacagtagaatctttatctactgttactttagcagactgtcctaaaacttgcatagtagcatcttttaagtctaaaccaaggtcttcagtaacgacagttcctcctgttaggatagcaatatcttccagcatggctttacgacgatcaccaaatccaggcgctttaacagctacgacattgaaagttccacgaattttgttaagaacaagcgttgggagagcttctccatcaacatcatcagcgatgattagcaacggacgatttgttttaagaacctcttctaataatggtaaaatttcttggatatttgaaattttcttatctgtaataaggatatacggattctcaagttcagagaccattttctcgttatcagttaccatatactgtgacaagtacccacggtcaaactgcattccttccacaacttcaagctctgtttccatacctcgcgattcttcaatagtgataacaccatcattacccacgcgctccatagcttcagaaatgtattccccaactttttcagaacgtgaagacacagccgcaacttgagcaatagcttctttgcctgaaactggttgtgcaatctcttttagctcttcaactgctgctgaaacagctgtttcaataccacgacgaatgccaatcggatttgcccctgcagttacatttttaagaccttcccgtacaatagcttgggtcaaaacagtagcagttgtagtgccatcccctgcaatatcattagtttttgaagccacttctgacacaagtttagctcccatattttcaaagtgatcttctagctcaatttctttagcaattgtcacaccatcatttgtaattaaaggagaaccaaatgctttttcaagaacaacattacggcctttaggacctaatgttactttgactgtatcagctaaaatatcaacaccacgcaccattgctgagcgggcatctgctgaaaatttaatatcttttgccataatttaatacccaggcctaaaatttaacaaagtctactttctttacaaagcaacttttctctaataggcctatatcctttcttgcttaataaaacctatttaacgacagcaacaatgtcactttcgcgaacaactgtcactttttcgttaccgtctttaacttccagaccagcaccattttcgactaaaacagtatcaccctctgcaacgctcggtgcaactaattcccctgttaaggtacgaataccgtcacccacagcaagaactttggctgtctttgtcgcatcatggcttgctcctgcaagaacaaaaccaccgacagatttctcttcagtttcaacaaacgaaatgatcacacgatcacctaatggttttaacataataaacgaacctccatacgagatatattttgattttttagcactcttatacagagagtgctaactacaaaaactattctatcacttggtcagaattagtcaagagaaaaggcacgtttcaaacaagaaaaatttccctagttatcctgtccattcactagagaaatttatattttaacctaagacaagggcatcatctatcaactgttgacctgagtttttatggaaaagttccattaattctgcaactgttaagtttctctttgcttctcctttaacatcaacaacaattttcccgtggtagagcatcacgagacgattaccataagcaatggcatgctccatattgtgcgtaatcattaaggctgtcaatcgttgttcttctatcactttctgtgttaattccataaccatatcgctagttttgggatctagagccgctgtatgttcatccagtaataataatttgggacgaacaagagttgccatagctaacgtgagggcttgacgctgaccgccagataaaaatgcagcatcagtcttcattcgattttctaagcctagacctaattgtgatagagactttttaaatagttgacggtcatcgtcagtcactgactgtctaaaaatgtgacgcttattgcctcttttatgtgcaattgccatattttcttcaatcgtcaaatttgttgcagttcccattctaggatcctggaagactcgactaatatccttagatcgtttttctacagagtctttagtaattgattggttgtctaatgtgattgccccctgatcaatagggatcagaccagcgatacagttaaggagggttgattttcccgcaccgttacctccaattactgaaataaaatcaccgtcttcaatcgttaaatctaaaccacgtaaaacatggttctcattgacagttcctttttcaaaagttttgtgcagattgactaattcaagtaatgacatgttcttatccttcctttgtaagtgatttagaggtttttactcctagtttagctcgtaattctgggacatacaaaatgagagccaacaaaattgctgaaaccaactttatcatctgtgcatcaatatcggttgttaatatgaaaacaataatcatacggtataaaacagaccctaatacaattgaccataaccttttgccaagaggtaagtattttatcattacttctgccaagataattgaagctaatccaataacgattgtacccactcccatattcaaatctgcatagccattattttgcgctaaaagtgcaccagataaagcaatcaggccattcccaatcatatatcctagcattttcatccgatctactttaatactattggcttgtcccatagcctcattatcacctgtcgctcttaaagctaatcctagttgggtatttaaaaagagatacaaaattaagataaccaagcctacacaaacaattccaattaataaaactgctgaaagtttatttaaacctaatcttgttaccattgtaaccaaagtatttttgagagcaaaagagacgtttgatcttcctaaaacaagtaaattaatagagtaaagtcctgtcaacgtaataatacctgtgaggagggctggtattttcattttagtatgaagaaaacccgatactagtcctgccaacataccacctaacatgcccgctatggttgccacaattggattaatatcattaacgatacataaagcgcaaactgcagcccccatagggaaagcaccctctgcagagagatcggctatgtctaagatacgaaaagtgataaacacgccaattgccataattgaccaaagtaatccttgcgaaattccggataagataatatctaacatacaatacctttctgattatttattatttttaatacttgaaacatcaattccaagctcttttgccatatcttcattaactactacttttagattttgaggatattctgaaggaactttagcgacgtctttacctttgaggattttaacagcttgtcttgccgtttgacgacctaaagcctcataatcagccccataagaaaagagcaaaccacttggtaccatatctgctgaacctcccacaacaggcacttttaattctttcgatagattccctaacagcgttactgagctggctataatattatctgttggtacaaaaataacctctgttttagacattaaactcttagcagtatcttgtacatcattagtggaagaaatacctttaacacttgttttaatccccgcctcttggaagattttttttgcttgttttacctgaacttctgagttacgctcgctagtggtatacataataccaacacgtttaaccttaggcattacttttctcaaaagggatacttgctttttaattggagacatgtcacttgtaccagtcgctaaaccttcaggttttttcattgattttactaattcggctgataccggatctgtcactgctgtaaataaaataggtgtttctgttgacaccgttgtcaacgattgagccgccggagtcgcaattcccaatactaatttattatctttaatgagtttttcagaaattgattggatatttgactgatccccttgagcattcttatactcaattttgatatttttgccatctttatagccttctttagctaattcttttataaatcctttcctagtggcagttagagagggatgttctacatattgtaaaataccaatatgttttacatcagattgaccattttgagaagattgtgaacaagctgtcatcagaacagttgctaaaacgctgctaattaccatctttgttatttttttcattactatctccttgtaataccatcaaattttccataaaacaaaaaaccaactagaccctacatctagttggttaattatttctctcaattcctctgtgcacgggagggcgaaaaaatattgccttaaccaactagattattgaaatgatctaatcggctctgctttcatcataaaatgctttagcttcatagatacaaactttgcgtgacgtttgtatccttgaggctacaaacgtctatctaaagaaactaaagtaataataagtatttgtttgtttaataatagacgatttgattaacatattattctctccttgtttatggttgcctataagtttacgtcatttaaaaataattgtcaatagttaaatttgatttttttgaaaattcttgttagatagataatttaaataatagtcattcgttgatataacacgcttttaaggaaatttagatttgctatccttaattttccatatactctactaaagcataataaataccatcgttatcattatcctgagttacatttccaattctctcttgtaaatctttaggagcattccccatgacaaaacctttacccacaatttcaagcagatttaaatcattatagttatcaccaaacgcaatagagtctgcaagagaaatatctaaatagtctgctaaagttttagcagattttcctttttcaatacctggagccattatttcaataaagtaaggagcagattgtgcgattgataaatgtggatattgagctttcaaagtgttctccaattctcccatcagagatggttctcccatcaagagaagtttatgaatcctatcttgcttctctaactccatcaaactcatctctttagattgtaaaccaacaatctcctcctctttttggacccactcattttctttatcacaggaataccattcatgataacgatagacattccatgcaattttcgaataatgcttgcttacataagaacaaacttgtaaggcaacttgaccatccattgtgtgggaagcaattgttttttgttgcatatcttgtattaaagccccattataggaaataatataagaatctattccaatttgttccataatcggagtaattgcctcaggcatcctagctgatatgggaacgaaagtagccccttgagctactatttgtttaattccctgccgtgtcttaggtgttactttaaaattactgttaattaaagtaccatcaatatcactaaatattagccttaccatattatcctccaaaatataattgtacacgcttactttagtctaacacttaaatttttgtttcgcaaataaacttcgtctggtctaatgagactactaatataagctatatttcaaaacaaattagtttatttctctcaatgaacggtgtaatatgttactatatagtaataataggaggattaactatgtcgtatccatacaaagccaatcattccattgaatcaatcaccttaaaagtaaatgacctcgaaaacctcgtaaacttctatagcgatatcattgggttaactgttattgacaaatcaagcactagagccttactaggggtaaatcaaaaaatccctcttattatccttgaaaaaactgaacttgaaaagcatagtacctatggcctttatcacactgctattttagtaccagatgaataccatctcagtctagctctaaatcatttattatctcagcatatccctctagagggtggagctgaccatggctatagcaatgctatctatctaagtgatcctgaaggtaatggaattgaaatttataatgataaggatatctctatgtgggatatcagagagagtggacaaattattggtattactgaaagactagatattgacaatttacttgacagccttgtcaacgttcctaataattataagctttctgaaaaaactagtattggtcatattcatttgagtgttaaagatgctaagattagctcaaaactctatcaaaatgtttttggccttgatgagaaatttgcaatcccgacagctagttggattgcatccggcaactaccatcatcatctagcctttaataattgggctggtccaaatctttctaaaaaccaagaagatagacccggaatttccttattgacaattgcttacaatgatgacaacctttttagagatagcttaaaaaaagcgcaactttaccaactgactttccttgaaaaacaagatcattattatattattgaagattttgatggcatccgaattaaagttgttctaaaaccagagaattaaccatcacttgacttttgcctcttcattttacataatgtcaatatgataaaaattttgatcccaactgcaaaagaaatgaaagtgtgtcaaaacattgcatggcctaaactgagtgctcaaacgaaaattataattgattatttttctactttaactgtttcagacttagaggatatctacagaattaatacaagtgcagctcgttgtgaggctcaaagatggcaagattttaaagctaaacaacttactctgaatcctgctattaagttattcaacggtcttatgtaccgcaatatcaaaaggcacaacttatccacaagtgaagcacaatttatggaaaattctgtttttattactagtgctctttatggcatcattcctgctatgacactaatatcccctcatcgtttagattttaacactaaaatcaaaatcaacaataactctcttaaagttttttggcgtgaaaattacgatacttttatgcagtcagatgacattatggtttctttgctttctaatgaatttgaaactgtcttttctcctaaagagcgtcaaaaactaatacatcttaactttattgaagatcgagatggccaattaaaaacccactctaccatatcaaaaaaagcaagaggaaagtgtttaactgctatgatggaaaataattgccaaactctagaacacttaaagcaattacgctttgatggcttctgttatgataatgaactctcagactctaagcaattaacttttgttaaaaaacagacttaagtaactatttatccacaatttattcacacaaaaagcaagagataatcgtatctcttgctttttgacaaacttgtaaggtctaaaaacctctctatatcaaggtttcaaacaatattaacaaaaaataattgttattaacaacttgtggataactatggggatagacagaggataatctgtttatataaagttgattacttaacactaatgtcattgtatatacctttagatttcaaaaatacttgttaaattaacaataataaacgtcaacatcttgtcacagactgtcaaatacttataaacaagttgtggataaacataacttttaatttttatttaaaagttaatttttgacactagagtaaatcatctcgtttgacttgttcataactattgtcaccatcgtttaatccttcccaaatcacgacttcaccttcttttaaagatttttgtacatcaatgattctttgatttgaagatcctctaaattgtagcattaaatttcgcttactttgatcaaacctaccatccactaaaatatcaatcaaagataacatctccaatttatcttgagtctccagcatcatttcttcccaagtataccccgtccatgaccaaatatctttttctggcaattcacgtcggatacgctgaagaagtggcaacaaaatacctgtatttaagaacggctctccacctaataacgttaaaccttggacgtaaggttgttctaaatctgtcataatttgatcttcaagctcttttgtataagggattccggctcgaaaggaccatgtagcagtattataacaccctttacagtggaacatacatccagctacgtagagtgagtttctaacaccttcaccatctacaaaattaaaagctttataatcaatgatatggccatgacttaattcttcgcttttccactccccaggctttggagtattccaacttgcttcttctgacatttctaacctctctattgatatgaaaagaaccagaactaactggtctttttattattatcttaaagtactattttaggttatccaataacgctctgtctgatgaagacaatcttctaaaacaccaccgttagctaatattactgacttgctggcatcattgtctacatggcatgtcacaagtatttcattaatattttttagatgtgcttgctcaattcctagcttcaactgttctttagcataacctttgccacgctggcgaggtcgtatggaataaccaatatgtccacctttttctaaaagagtatcatttagtcttaaacgtaaatttaagaaacctatagcattattgtcattgtcaaaagacacaaactgaatatatggaacaaaattatcaggaacgcctacccctaactccatatttaggttatgatctagccagtcttcaaaatgcatagttggttcataaaaaccaccgtccactgaactactttctttttgaaactctttatacatggctaaaatttcttctttatcttctaacactgggcgccgtaatttcatattgtttcctattccattatcttcaagttaagcattccaaaaggagcattcgctttattaatctggtcacaaataaaatgactcaataaactagactttggtgatataggattgacacctgtagtgatagcttgaataaaagcatcaatcattggttcaaaaccacgtttctctagagtgcttgcccaagaaccaaaaccgatagcacgacggtcaaagccatcaataacagaaagatttgacaaatcatctaatgaataggttacttctggcgactctatttcaattatttctcgacgagaccccgactgcaggttcatgcttgcttctattatctcactgtctgtttctagcgttactgatacttgtaatatcttattcccatcacgtttagtcacaaagtatcctcttttaacaacattatttgtcaaaaatagcgccgtatctaaaggatggataaacatatcaaaaagcttatattgaaaatccgctggtgcattgacagcatttttaaaggtgcgaatatggtttttatcttctacttttttcatttccataatacgtggtgcaaagcgacgattaaaacctgccattaaaaatgttttatgatccttcgccaaatcatacaatgctttagttgaagtataatcttctgtcaaaggcttatccataaaaactggaatacccttttttaaaaaaagctttgctatatcaaagtgagcactagtcgcgacatgaatgaagactccatccaaaggatgctcggctagactatctaaactgtcataagctgtagaagaaccaaaaagcatattaacttcttctaaaatctgtttttggcgtgtaaaaagatgccagtgcacacctgtcacttgacgcatataaggtagataagctttctgtgaaatacctcctaaaccgacaattccaagttgcaacatagcatcctccttctattttttctttgccttttccaaaaattgtttccttaaatcttttagacgtgatttttgattagcattctctccagtagagtgcttctcatggaacttctgtacttgtgcttgccctttgtaatctaattggtatttccccatatcttaataactccttctattttatcttcttattttaacatataatagaccagaggttttaatagaggttttaattaattaccttgatttttaatacttgatccgttcatatgttttacacgagcagagatttccttatgacgaccattaaccatcggacgagcctgtggattacctaaataaccacatgtacgtttgacaacatctactgtcttagggtcgctgttaccacaatttggacaagtaaaacctcgatctgtcggtgtaaaatccccttcaaattgacattggtaacacttatcaatcggtgtattagtacctagataacctacccgatcataagcatagtcccaaactgcttctaaagcttttggattctgttgcaaaacagggtattcacagtagtgaataaatcctcctgatgcacccgtttcaggatagattttctcaaaatctagtttttcaaaaggtgttggattcttacgcacatcataatggaatgaattagtgtagtattccttatcagtaatatcagttactataccaaatttttcagtatctaaacgacaaaaccggtcagtcaagctctccgatggtgtcgaataaactgaaaaatgataatcatactcatcagaccaatctgcacataactgcttcatcttacgaacgatgtctacagtaaatgctttagcttgatggttatcttcccagtcaccaccataaaaaacactcgccacctcatataaaccaatataaccaagagacaccgttgcacggcggtgattaaagagtcgatcaacattgtcatattttcctaaacgttctccaaatgctccatactggtaaagaatgggcgcatttgctgggatagcctctttgacacgttccacacgataaaccaaggcatctctagcaatactcatacgttcattaaatatctcccagaatttatccatatcaccgttagactccatggcaacacgcggtagattaactgttacaactccaagattcatacgaccagatgttacatcctgaccatttgcatctcgccacccttgtaggaaagaacgacagcccataggggctttaaaagagcccgttaagtcaataattttatcataagaaaggacatctggatacatccgttttgtcgcacactctaatgctaattgtttaatatcataattggggctatcttcttctaaattaagaccttttttaagcgtaaaaattaattttggaaaaatagcagtacgatgctcgcttcctaaaccttgaatccgaattttcaaaatcgctttttgaatttctcgttcaaaccaattagttcctaatccaaaaccaagcgaagtaaatggcgtttgcccatttgaagtaaataaagtattaatttcatactccaaagattgcatggcatcatatatatctttttgtgttttagcgcgcgcatagtcttcttgtttatcttcaataacccattcttttgcatcttttaaatgtttttgataatttaactgtgcataaggagctaaaaactcatcaatgcgatctgctgtacagccaccatattgacttgaagcaacgttcgcaataatctgtgaaatctgagcagtcgctgtctgaatagattttggactctcaacttctgcattaccaatcttaaaaccatttgcaagcattcccttaaaatcgattaaacagcaatttgtcatgggagtgtatgggctgtaatctaaatcatgataatggatatcacccttttgatgtgcatttgctacatgagaaggtaacattttcagaccaattgatttccctacaatacctgctgttaaatcacgttgggtattaaacacatcagagtctttattagcattctcattaacaacagtttgatccttattaattaattttccaatagaaaaattgatatctgtagcctgtgaacgctcaaaatcgcgttgggtacgataattgatatattcttgtgcaatagcgtactcattagcttccaataatttatgttcaacgatattttgtatttcatatatcttgatgttatctttaaaacgattgtagatctcagcgatgacatgatctgcaatcatctcaagtttagcctcaactaaaggagacattttgataactttattactagcttttaatagagccgtgtagattttatacttatcaaagctgaccaaacgcccgtcacgtttaatcactttgatatcagattctgtcataaatcgttctctttccaataccatcatgtgaaatatcctccagtgacaattatagcatgcaaagaaaaaaaatcaatatattgtgtcaagttttttgctcagacacaatatattgattttttaatctatttgaaacgatatagaacaaaatgagtgatatttgatagaggaacttcttggtagtgcttcttaatatcagatttcagttcatttggtaacttctcatttttatttaagataaagtatttagccccatgctgaagcagctcgtccttcaaaattttctcattatttttttgcgctgtattaatatgtggcaaaacaaattgagaagcagattttaaccgagtctggctataaatgctagcaactttgtcccaaacataaatcttaccatctctatcaatttttgtagtcaaataatgtgaaatgtcacgcctttctttactaagagtaacattttgataagtattataaactagtaaccctatcgataaggaaactagtaagaggggcaaataatatgttttctttacaaaaaggtctacgataagagatttaccagagaaatactgacgtctatgtgaacgtctgtcaatcactttttggtaaagaatagtaattttattactcgttagcaaaagaccaaatggtaaagcaggtaaaaagtggtaaaggttaaaatctcttgaaaaaatggccattatagcgtaaataataaaaatacaggcaataaagttcaagccgatttgataagatgcttttttacgattttgaataaaatcccatagtccaaagagacaacctgaccctagaaggacaacaatttgaattgctaaactaagaaggaatgagtggtttgtcctagcgaaatacgtaaaggggtaaaaaatagctttgtcaatataagaagagataatctgtagattaaacataaagtaaccaacagtataagcaattaaaatcataccaaaaacaacgcataaaaactgataaaatcctcgtagtgactgcttttgcttaatattggttgctgttaagagaacaaaagagcaaagccaaaaaatcagtgtttggggatctataaatagtgagaatgctgctaaaatgccataaaatataaatgcttcatcaacgatattatcgacacaaaatttaattaaaaaccatagcgaaatgagcataaaaggtaatgcccactgtattgggtacataccaccgaatcctaagacaatattcattatatagaaaatcaacgtcatgcctatcgagacaatttcactttgtgccacataataaactaatttataaaaataaattccagatacatagtaagcaataaactgtacaataagtaaccagatactagaccctaaaaggtaacttagagcaatcgttacatagtataaaaatcctcctgtagcaaaaacatcactataagggatctgtcctttggtcatcatcaaacctgtatagagattctgagtctgcaaaccatttgcaaaataagtcaataaaggatttgcaattgctaagagagttgacaaaacactatatagtaaaattgaaaatcgactagatttcttcattctgatagccgttcgtttactcattgatgggctatttttatagctcactccaattggtttttctaggttttctaccactatttttctcctcatatttacatactaccagtatatcagaaaaccttatttagtcaatttagccaacacttgaccgtaacgaataatatccctaaagtagtggtattttctagacatatattgtttgagaaattcttgttcttctagtgttagctgagtatctgacattaacatcacctccttttactacatcatcactattattattcgaaaaaaaaacgactgaacaattgctcaatcgcttcgatattattcttcatctagaaagctgttgaaaacttcctcaatcatgtcccattctgcatctgaatcttctggtataggctgaaggtctccttcagttccatcggcattttctgtaaatgagtaagcttgaatctcaatttcaccttgttcgtcttcttccgcacctgcaggaacgaggagaacatagtttttgccaaactcttcacgcccatcaatagttaatagaatttcaaaaagtgtttcgttcccattctcatctacaagagtgattacttcatgttgatgttcatggttatgatcgtggttatgattatgtgccattgtttctcctttttatgccgaatgcttaaaacatgcggtctaaataattttgtaagattagttgagctgctaatttatcgataactttcttacgcttaccacgactaatatcagcttgctcaactagcatacgctctgcttgaacagtcgttaaacgttcatcttgatattcaactggaagattgaataattcagtgattttatcgccatatgcctgactagcctctacacgaggaccacttgtattattcatatttttaggtagaccaactacaaatttatcaactttgtactcttttactaactctgctaagcggtcaaaaccaaaatttccagattcttcatcgatcttaatgatttcaagaccttgtgcagtgaaaccgagtggatcactaattgcaacgccgacagttttcgagccgacgtcaagtcccattattctcattacaaatctattccatttccttgtaaataataacgaacgagctcttctacaatctcatcacgttcatatttacgaatttgattgcgagcatcattgtaacgaggtacataagcagggtccccactcaatacgtaaccaacaatttgattgatgggattgtaacctttttcttctaatgaacgataaacagctgttaatgtttcactaatttctactttgttactatcatctaatctaaaacgaacagtttcatctgtaaatcccatacctacaccttctttcctttaattctttcacttattataacttaaataaagtatttgtacaagaaattgataaacactatattagaaaatcaaaaagggagcacaagaaaccaagaagtgattctttgatttctttactccctaccttataggtgatttttacaggttatcgtgtgactctcacttatgcttatctaaagctcaaagtgctgcacgaagacgagcttctgcattttcaacgttacgaatagagcgaggtagaaaagcacgaatatcatcttccttataacctacttgaagacgtttgtcatcaattagaattggactctttaaaatacgtggattttcttgaataagatcaataacttcatttacactcaactcctcaatattacaattgagcgccttagcataacgatttttagaagaaacgatactttcaataccactttcagtttttgttaatatttctaaaatttcatcacgtgttagtgattctttacctaggttttgttctttatatggaagttgatgagcatttagccaagtttttgcttttttacaacttgtgcaacttgaaatagtataaatcttaatcatgtgccttctcactttctatcccatgatagttatagtttaacatagtcacaaaaatcaaacatgggacttaagacctattttttatcaatttactaataaaaataaatagattttagggatttttaagcttatttttagtataaaaataagttccaaccactgtcagaacttattttagttacatttattcaagttcaagatgtatagttgctattttattcctcaatttcaatagcattgtccaaatctaaaacaagatcatcagcttcatttttttcttcaacgagctcagactgaactggcgaatcatcttcagtcattccaaagtgcacgcgcactttatggtcaatttcatcaaaaattgctggattatctgctaaatattttttggcattttcagaaccttgtccaattttctcaccattatatgagtaccatgcacctgctttttggataatatccaaatcactagcaattttaattaactcacccgtgcgagaaataccttcaccatacataatttcgacaaaagcttcacggaatggtggagcaactttatttttaacaactttgatttttgtctctttaccaacattatgatctttatgctcaccagttcccttgatttgagtattaccacgaacatctagacgaaccgatgaataaaatttcaaagcacgaccaccaggtgttgtttcagggttaccaaacataacgcctactttttcccttaactggttgataaaaattgcgattgtctttgtcttgttaatggatgctgacaatttacgcattgcttgactcatcatacgagcttgcaaaccaacgtggctgtcaccaatatcaccatcaatctcagcacgaggaacaagggctgcaactgaatcgacaacaactaaatcaactgcgcctgaatcaatcaatttacctgcaatttcaagaccttgctcacctgagtcaggttgagacaaaagtaactcatcaatattaactccaagagccgcagcataggctgggtcaagagcgtgctcagcatcaataaaggcagcaatcccaccttccttttgggcttgagctacggcatgaagggcaaccgttgttttaccagatgactctggtccataaatttcgacgatacgtcctttaggatatccacctgctcctaaagcgatatctaaagcaagagaacctgaactcattacttgaaccttttgttcagctcgctcacctaagcgcatcactgcgcccttaccaaaatctttttcaatatttttcaaagcatcatctaaggcttttcgacgttcatcaccgaatttcttagtaatttcttctgcttttttcgtttttttagccaatgtcttctccttatatttctatgaatctaggttgattcaaatttagaaatcgttctactaattataacaaatattatatctttaataaagccctacgcaccaagtcaaaagcatgtaaagtactgatatgacggacatctgagcgactcttccctccaatcgatactttaatagaagaaacgccttcaggggttgcaatcccaataaaaactgtacctgcagggtatccttccaactcatcaggaccagcaactcccgttaaaccgataccaaaatctgcttttaaaagttggcgagcttgctgagccattgcctcagctgtaaaatgactgacaactccatattcttgcaattttttcttagggatgccgagaagttgtgattttgcttccatactataggtcgtaaaaccaccattaaaaacttgcgaagcaccagaaaattctgctaactgagattgaaataaccctgctgttaagctctctgcggcagtaatcgttttattttgtactttcaataattctaaaacagtacgtgccatactattattatcaccataaccatataataaatcttttaatttacggttatctaatgtcttaagagcaagtatttctttttctaagctatctaatttaaagtcggcctcatcctgattttcagctttcgttgataaccttaaagttacctcaccaacctttgcatatggtgctatagttgggtctgtctgattcttaattatgtcttctaagattgtgactaactgactctcaccgataccaaagaatctcaatacacgtgaatataattttgtgccattatttgacaaaataggtactacctgctccataaccattggctttaattcactaggcggacctggtaaaaccatatattggactcccttagatgtaacgataccaccaacagctagaccagtaaggttttgtagaggtattgagccttcaaccaattgagcttgtcgttcattatttggcgttctagcaaactgaggacgacttgcaaaaaaaacgatccaattttcgactagctaataaatctactgttaatgatttacctaaaaatttagcaaaagtttgcttcgttaagtcatcctctgtagggccaagtccaccacataggataaccaattgactgcgctgactagctatatctaaaagcgataataaacgttcctcattgtctcctacagctgtctggaaataaatatcaattcccaattctgccattttctccgacaaaaattgtgcgtttgtattaacgatctgtcctgttaaaatttctgttcctacagcgataatttcagccctcacaacttcaccctcttatctattcgaaataatgactacattttagcaaaaaaagtagcaaaagtgctacttaaaacatatcacattgatattacttgaaatcacatatattttcatggtcattaaccatacccgcggcctgaataaaagaatagaggcaagttggaccaacaaatttaaaaccgcgtttttttaaatccttagataagcgttcggataaggtagtacttgcaggcacatcgttgtagttgttaactgagttaacctgtactttattatctacaaaagaccaaatgtagcgatcaaaacttccgaattctttctgaattaatataattgacctagcattttgtcgtgttgagaaaagttttagacgatgacgaataaccctaggattttgtaagattatctctaaatccgcatctgacattgcagctaccttttcaatattatagtgatgaaaaacttgtctgaactcctgacgtttatttaatactgtttcccaagataaacccgattgataagtttctaaacatagtaactcaaagagtacatgatcgtcatgaacagctctcccccactctttatcatggtaagctacatataatggattatctaaattcacccaagaacatcgtttcatgtgaaacctcattacttctaaattatttcatcaacatcttcaaactagatttgatgtattgctccacagtctcgttcgtaccttcaaaaaaggcttttacttttttcaattcagtcgccttataccccaacgctaacaaagcttccatagcttcttcaagattgctattctgctcagagctaaccttacgactagtcgcactctcaccagaagcttctacaaacttccctgacaaatcaaggatcatctgttgtgctgttttttttcctatctttggaaatttagtcaaatacttaatatcactattatcaatggcacttacgagaccttcattgtcatcgactgcaataattgctaaagcggtcgttggaccaattcctgatactgaaattaaattaagaaaaatttctttttcattttccgtatgaaagccaaataaaagatgtgcatcatcgcgaatgacttgatgtaagtagatggtaacttcttgattaacgtaacctgaaaaagagtagggatttgccacatatatcatgtatcccaatccagctgtttccacaacaataaatttagccgttattttactcaattttcctttaatataatcgtacattctattttcctatctcaatatttttcattttggtagcatataagattaaaaccagacctgctaacataaaaatggtcaatgttatttgaacacctatttttcctgtaaaatagctgagcgaaaccatggcacctgctaatacacttgcaacaggttgtgcgatagctaaaaatccagaatatgatccaatttttccctccaccatcatctccgcccttagaacctgactagctggaacataaatcatttcgccaaaggtgaaaaacgtcatggcaatcaaaatagctccaaaagtgtttagagaaatattaaaaagcattccaaaaccacaaatcaagctccctaatattagttgacgtttcaaaggccaattctctatgaatttatttatagttgtcattagtaagacaattaatagagtgtttgtaaagactgctaaactaagcattttagcacctgtgattgtatgtcctaaaatggacactacttcaaaattttgcttaagattgaccgagaaataattatcaacctggagccagacaacactggaaccaattgctcctaaagtataaacaacaaacgctttatccactaaaacctgactataatttttaaaagttcctaaaactcctttatcatgcttgaaggttccctcctgtggttttgtctcatcaaacttgaagtagaccacgaaacaacaaatcgctgaaataataagaagaactattaataattcaaaaaaatggtgatcatagaaaatcccagcaattccagaacctagcattacagcgatgttaaccaaccaataacctatagtgtaaacaaagcgacgattctgttcgttcgtcaaatcaatggtcatagcttcataggcagggaaataaaattggtgagctatttcaatgataaggatacctacaaaggtcaagtgtggcgtaatatgatttggaacatttgcagctatagttatagcccaaccaatggttgccagcagtgaacctataatcacaacttttttcctccccatagcatctgacaaatggcctccatataaggtcgctacaaaccctgatagttgagttatgatgatcaagattcctgtaactagatttccaaaatattgaacataatacattgccataaaaggaaaaatagctgaaccaaccgtaatggaaataaaacgcaataattctcttaactgtagctgttttggcaaagcaaaaaactctttcactttttctcccttcttccctaacaagtaattatcaatattttcctaaatccctgaggcttgtatgattttcttggattcgtttaaacattttctccatatcagcttttgtaaaattaactaaaacaggtcttccatgagggcaattataaggatttttacattgcgctaactgatctaataaatgacgtgctgagtaatcgtctagcgtatggtttgctttaatagatcgcttgcaagacatcataatagccaactctgcgcgatattttttcactgatacttcattagtgagcaacaacatatcacacatttcataaatgccagactctacctcttcttctttcatccaaattggatgttcccttaaaatgaaagtattattaccatacggttccaagaaaataccaacatcttgtaataatgacattttttcttgtaattgaagaaaatctgaacttgaaaattcaaatagaaatggtactaacaattgttgaagactattatcaacctcacctatcttttcacggtaatactcgtattttacacgctcttgagctgcatgttgatcaataatatacaacccaccattcccttgagcaaataagtaggtcccatgcatttgaccaaaaaattcgagctctggaaaagtcgaactttcttccgaatctaatttttcaacaagtttgttaagtgactgtttactactaaggtaatcctgagaatgaatgaagttctcactatcagcttgatctctactagcatactttatattaggagactgcgttgctccttgattaacagagttttttacatcattgtcaactgaaccgtcacttttgtcaaggtttgtaaagttagcaataggttcagatacagtatctgcacctataaaaaagtcatttttagccctatcgtaatacaaaccaggctgttttagtgagaagcttgtttgtataggcttatctacacttcgggtactagttttagctaaattctctaaagcatccggaatcaagtcatattgtttaagactctcagaaattgctgtgcttattaaactcattaattctcgttccttagaaattctcacctcttgcttagtcggatgaacgttgacatctgctagataaggatctatctgaatatcaatgacagcaattggaaatcttccaaccatcaactttgaaccataaccatctagaattgagcggttcaaaagaaaatttttaatgtaacgaccgttaattaatagggtaatatagtttcggttagctcgtgtcaattcaggcaaacttacataacccgaaatttcaaaatctaaatctgcatttgaaatctcaatcattttttttgcagtatttaaaccataaatacctgcaatcgcctgtctcaaatcgccagtcccactagttttagtcatttctttaccatcatttatcagtgtaaaagcaacttccggatgcgctagactgagtctattaacaatatcaataatatgagctagttcagactgtaaactcttcatgtatttcaatctggcaggcgtgttaaagaataaattttcaactaaaatttttgttccacgaggacttgaaacaacttcctgtttttcaatgtttccccctttagcaacaagtaacgtcccttgtttcccttgctctgtagctgtttttatcgtcattaaactaatcgaagcgattgatggtagagcttcaccacgaaaacctaaggtccgaatacgaaaaaggtcactctggcttttgattttggatgtagcgtgacgtcgtaaactgagaacggcatcctcactagtcatcccttcaccgttatccgttatttgaatctttttaagaccagattcttcaacctctatggtaatttggctacttcctgcatctatggcattttcaactaattctttaacgacgctactaggcctttcaacaacctcaccagcagcaatctggttagctaatatatccggtaattcaataattttagacaagttcatccctcctttttttatgattttttgtaactttttttgtgatatcttagccattataccatattcaaaatattaatttgacaataacacaatttttagttgacatcactcctattacctgttagacttagggagcgtaataagttttgaagttgtatttttgtttaacatttttaccttttttattttttacagtaacatttttagaaaggtaataaacaaatgacacaaggtacagtgaaatggtttaactcagaaaaaggttttggctttatttctagcgaaactggaacagacgtcttcgctcatttttcagagattaaagttgatggcttcaaaactcttgaagaaggacaaaaagtaacatttgatattcaagatggtcaacgtggaccacaagcaacaaatatcaatcttgttaaataattaaaaaagagcctaaatgaattatttagtctcttttttgttgcctaaaggctattttataataatttctttaagtcaaatatagcattcatagcttgcattggagttagattcattatatctatcgcttctaactcctcaataaccctacctgcatttgaaggttcttcaaaaagcgataattgtccttgttgcttctcagaatctagttcctcatttaagtcagcagtaacagcttcttgggagggcgatacgatcaactgtactgcatcagcttccaactgtgataaaatatcagttgccctatccaataagtcaattggtaaaccagctatttttgcgacgtgtatcccataagacttatccgcaggtccagattcaattttatgtaagaaggtaacttctccatctctctctaaagtagccacgtgtacattgacaagccttgtcaactgttcagataaatctgtcaactcatggtaatgagtcgcaaacattgtttttgccctaacacggtcatgaatatattctataatcgattgagctaatgccataccatcataagtggctgtccctcgacctaattcatcaaaaagaatcaaagatttatcactggctcgttttacagcttgattcgcttccatcatttctaccataaaggttgattgcccagaaattaagtcgtcagcagcaccaatcctagtaaatattgcatcaaatacaggcaaatcaacttcgtctgccgatacaaaacctcccatttgtgccataataactgtcaaagctaactggcgcatataggtcgacttaccactcatatttggtcctgtaatcaactggatatctgtctgactatcaaaatagatgctattgggaatatattcttgcactcccatcactttttcaacagttgcatgacgcccattcttaatcttaatctgatgttgatcattaaatttgggacgaacatagtgataattttctgcaactactgccaaactctgtagaacatcaacggttgcaatcgtctttgctaactcttgaagacgtttaatataagattctacttgggcacgaacacgcataaaaatatcatattctaaatttgaagattgctcgcgagcttcgagcatttcaccttcaattttggctagttcagctgttccatagcgttcagaattttttaatgtcgctttacggaaaaaatgctccggtactagtgataaattggaattggtaacatggaagtaataaccgtcttttttattataatcaattttaagagtaccgataccacttgctgctctttccttagcttcaatatcagcaatccaacctgtaccttcacgcatcactgttcgataattatccaattgcttatcaaatccagacttgataatgtttccctcagtgatagtagcctgtgcttctggggctatcgccgtattaattaaactttctaattcaggcatagtgtcaattttgttgacaatgatgtcaagctcaggttgattgaaggactgtaaaatcattttaatccgaggaatttgtgataaggtctgtccgagttgcaatagatctttagggttggcttttccgaaagatactcgacttgctaggcgttcaatatcatatacaccctttaaactttctgtgagatcgtttctctcaaaaaaataatcaagaaacacttgaataatatcttgacgttccttgattcgattcatacttaccaaaggcctgtcaatccaagttctcagcattcgagttcccatcgctgttttagtctcatctaacaaccagtaaagacttccatgcttcttgcttgttctagcattctccagtaaatctagactatttttcgttgcatatgacatttgtaaatagtcctttatttcataatgaactactttctgtaaatgactaagttcacgcttttgtgttctatgcacatattgtaaaagtttttccgcagcagatatttccaaatcagttaactgctcatcaatcaaatgaatatcattaagtcgttcgtcttcgtatgataaaagcaagttcatctgcttcgtcagtaggtgatttttttcgtccgtcaattgatatcctactacaatctcacgagcttttaaatttagtatttcactacggacggactcaaaatctgttaaaagggttgcctgaaactctccagttgagacatccatatatgctagaccaaatgtttgttgatcttgcgaatcaatcgctactaagaaattattagcactatccggcttcgttgactccacaaccgttcctggggtaacaacttgcactacctcacgcttgaccactcccacagcttttttaggatcttccatctgctcagcaatggctactttgtaacctaattcaactaaaacgtcaatatactgttgagctgagtgatagggaactcctgccattgggattggcttttctgcgttcttatttcgactagtcaagctaatttccaggatttgtgctgcttttaccgcatcatcataaaataattcataaaaatcacccattctaaaaagcaaaaaagcatctggataattctcttttatatccagatactgttgcattcccggtgatatcgttggcttggccatttctcactcctaactaacggggctggctgccatgctcagctcctcaatcattatatttataaacctactgatagttctttttcaaaaactttggcaatatcttcattttgacaaatcaccaacaaggtgtctgctcctgccattgttcctaaaatctctggcagccctttctcatcaataaagtttgctaaaacgctagcctcccctaaattagtatttaaaactaacataaaacttgctcgcgatactttcaaaatatatgagcgtaaggctgggctaaatcgatttgaagtagctgttgataaactataatatagcttaccttctgggctacgtaattttaaaagaccaatctcacgcaagtctcttgatagagtcgcttgcgtgacatcgattccttcattttttaaatgtaatttaatttcttcttgtgtgccaatctgccctgattggatcaaacgtttaatacgtttttggcgttctattttattcatgttattcaatcctttttagttagaattatgcttaccaaattatatcaaaaaaaattgtctttttcacttagtagtgatatcgtaatcattctgtaaaaaagctataaagtaggctagttctttacagaatgcattatgaatttaatcaacaagttctcgtctatttttcataattatgttaaaatagggtgactatattactaattaaaataggagataccatggatacaaaacatctaattgcgagtgaaattcaaaaagttgttccagatatggaacaatcgaccattctttctttattagaaaccccaaaaaattcgagcatgggagatttagctttcccagcattctctttggctaaaactctacgcaaagcacctcaaataattgctagtgacattgctgaacaaattaaaagcgaccaatttgaaaaggtggaagctgttggaccttacgttaactttttccttgataaagccgcaatctcaagtcaagttttaaaacaagtcttatctgatggttctgcctatgctactcaaaatattggtgaaggacgaaatgttgccattgacatgtctagtccaaatattgctaagccattctcaattggacaccttcgttcaacagttattggtgatagtttagctaatatttttgataaaattggctatcatcctgttaaaattaatcaccttggcgactggggtaaacaatttggaatgttaatcgttgcctataaaaaatggggcaatgaagaggctgtccgtgctcatcccatcgatgaacttttaaaactttatgtccgtattaatgctgaagccgagacagaccctagcgttgatgaagaggcacgtgagtggtttcgtaaacttgaagctaacgatcctgaagcaactgaattatggcaatggttccgtgacgagtcattattagaattcaaccgtctttacgatcaaatgaatgttacatttgatagctataacggcgaggcattctacaacgacaaaatggatgaagtgcttgaactgctagaatctaaaaacctcctagtcgaatctaaaggtgcacaagttgttaacctagaaaaatacggtattgaacatcctgccctcattaaaaaatccgatggagcaactctctacattacacgtgacttagctgctgcactttaccgtaaacgtacctacgattttgcaaaatcaatctacgttgtaggaaacgaacagtctgcacactttaagcaactaaaagctgtgcttaaagaaatggactacgattggtccgatgatatgactcatgttccttttggccttgtaacaaaaggaggagcaaaattatcaactcgtaaaggaaatgtaattctacttgaacctactgttgcagaagctattaatcgtgcggcatctcagattgaagctaaaaaccctaacctagcagataaagataaagttgctcaagcagttggtgtaggtgctattaaattttacgatttgaaaactgatcgtacaaatggttatgactttgacttagaagcaatggtatcatttgaaggtgaaactgggccatatgtacaatatgcacatgctcgtattcaatcaatcttacgtaaagctaactttagcccatctaatagcgataattacagtctcaacgatgttgaaagctgggaaatcatcaaactcatccaagattttcctcgtattattgtacgtgcggcagataattttgagccctctattattgcaaaattcgctattaatttagctcagtgcttcaataaatattacgcccacacacgtattttagatgaagacgctgaaatcagtagtcgtctagcactttgctatgcaactgctacagtattaaaagaatctcttcgcctcctaggagttgatgctccgaatgaaatgtaagaaatgacactactaagactgtcaaatttatgacagtcttaattttttatattataataatagcacaacaagttacaggagaatgccatgccatcagaaaaagaaatattagatgctcttagtaaagtttatagcgaagaagtaatacaagcagatgattattttcgtcaagctattttcgagctcgctagtcaacttgaaaaagaggggatgaactcactcctagctacaaaaattgactcacttatcaatcaatacgtcttaacacatcaatttgatgctcctaaaagcatatttgatcttagtcgcttggtaaaaacaaaagctagccattacaagggaactgctatctcagctattatgcttggtagtttcttaagtggaggaccaaaataaaaatacaggccagacagcctgtatttttatttatcgtaatttcttcgtcgaattttaaaatctgagctaataacttcatctacatttataacagaaataaaagcatctgggtctaaatcagccatgatttctttcacatcacgcacttcacttgggttaagagctacgtacaagacatcatgctctctacctgagtaggcaccttggccccgtaaaaaagttacacccctattaatttcatgcaaaatggttgctgctgcagattctgattctttggtaataatgatcattccacgaacagtgtagcccccattttcaacatttgttaacacttgactaaatacaaagctagctactaacgtatatagcatctgttgtaaattaatataaacaagtgaagacgttagaactatagcatcaataaacaataaggtttgccctaattttattccagatttttcctctacaatacgaccaataatatctgcaccacctgtagttgcaccatatctaaatactaaaccactaccagttcctgctaaaattccagcagctactgcaactaacatcatatcgtttttcaaagggactgttacagggatttgttgccaaaaccacatgaaaaaagacattaacactgtaccatatatagttaacaataaggattttttccctaaaatcctagcccctaatataaataacgggatattaaggagaagtgatgaaagtgctggattaactccgaaaagtgcatggataatcaaagtgacaccggaaatacctccttcagccaaatgattagccatattaaatttgacaaagccgaaagtatagagagccacaccaaaggcaattaaaatagtttcttttatctttgtttttaaatccagtttcaacataggcttaatccttccttattcaaaaaagctaaagttgtttaaacaacttagcttaataacatcataatgtttccttagtggtggctgaccaaaagtcatatatacagttaatcatcatcaacgaatcgtccaataatatgaacattttctgcaacggaaacaaaggcttttggatccgcttttagcattaaatatttaaaatcactaaattcttcacgtgttaatatagttattaaaactgcttttttctcatgattataagtaccttcagcatcattgatacaggttacaccacgatgtaaatcacgatggatacgtttaatgacgcaataaggcttactggtaacaatcatcgcttgcatctttttttgctttgtaaaaatggcatctgtaactctacttgatacaaaaatggtcaccatcgagtacaaagcgtacttccaaccaaataaaagacctgcaaataataaaataataccattaataataaaagaaatactacctacatctctgcctgttttctttctaattgtcaaactgataatatctgttcccccactagaaattctagacttaaagctaaaaccaacaccagctcccataattaaaccaccaaagatagcattgattaagggatcagttgtaagggtgatttgaggcattagttgaatgaagatagagcttacagttactgtgataaacgtaaaaatagtaaatttatgtccaatcttacgccaagataatatcagcaaagggatattaatggcataaaaagctaaagcaactggtatttcaaaagaaaaccagtgtttactgacagctgaaataacctgagctaaaccagttgctccacttgaataaacatgtccaggttgaaaaaagaaattgacagcaacactggatagaataccatacagcaatgaagccgaaattttctctgcatatttttctcgtgagatactttttaaagtgtgtaagagaccaaattttttagcccatacactgataatatattttacctttttttctaaaggggttcgtctagttttcataactttctacagtaagtgataattcttctaattgttgttctgaaacgagactaggagcttgagtcattggatcactagccttattgtttttagggaatgcaataacttctcgaatattgtccttgcctgctaacaacataacaaagcggtcaaggcctattgccaatccaccatgtggtgggaagccgtaatccatagcttcaagtaagaaaccaaactgttcctgagctgattcagcgctaaatcctaaagccttgaacatacgctcttgtgtatctttttggttaatacgtaggctaccaccgcctaactcatatccattcaaaacaatatcataggcaactgcacgtactttagccaaatccccttccaactcatgcgctgtctccgctgttggcaaggtgaatggatgatgagccgacatatatcgtccctcttcttctgaccactcaaacattggccaatcaacaacccataggaaattaaatttagaataatcaatgagttcaagttcttttgcaatgcgtgtacgaagcgctcctaaagtctcgttagctacttcaagactatctgctacaaatagaattaagtcattattctctagctgtaaagcttctgtcaacctaccttcaatagctgtcaagaacttagcaaccggacctgaaatagtattatctgcatattttagccatgctaaacctttggcaccgtattgttttgcaatttctgttaatttatcaatattttttcgagagtacttgtccgccttatctttgacaacaatcgctttaactactgaagcttctgagaacaccttgaagtcaacttctttgacaatttctgtcaagtcttgtaaaagcatatcaaaccttgtatcaggcttatcagacccgtagttattcattgcatcatcatatgccatccttgggaatggtaaagaaacctctaaacctttagtgtctttcattactttagcaatcataccctcaacaatgtcttgaatttcttgatcactaaggaatgatgtctctaagtcaacttgtgtaaactcaggttgacggtctccacgtaaatcctcatcacggaaacatttgacaatttgataataacgatcaaatcccgcattcatcaatagctgttttgtaatttgagggctttgtggaagggcataaaaatgtccttggttgacacgtgatggaaccaaatagtctcgtgccccctctggagttgattttgttagcatcggagtttcgacatcaataaactctaagttgtcaaggtaattacggattgagtgtgttactttcgcacgtaatttgaaattttcaagcatttccggacgacgaagatccaagtaacggtaacgcatgcgtgtatcatcatttgcctcaataccatctttaatttcaaatggtgttgttttcgaggtattaagaatcgataattcttgcacttttaattcaacttctcctgttggtaaattatcattagcttgttctcgtgctgtcactacaccgctaacctctataacaaattcactacggagactttctgcggttgccataactgaggctgatacttcttcaggattaataactaattgcatgattccctcgcgatcgcgaagatcaataaaaataaggcctccaaggtcacgacgacgaccaacccatccttttaaagtaatcgatgttcctatgtgctcactacgaacacgcccagcatacatactacgtttcatctgttttctccatttaaaatattcattccaacctattataacaaaaagcacctaaaaaccccacccattaaggagagtttttaggaactgttttacaatcctaattgtttaagcacagatgaaaaatctgttttaatgttttcaaaactaactttaacttcttgacgtgtttgattattttttaaaccgacctctttcgaatctacttcactgctacctaatgtcataatcactttagcattaaaagtatctgcagacttaaattgtgctttgattttacgacccaaataatcacgctctactttaaaaccctgatgacgtattgattgtgccaaatctaaggcagctagattagcctctgatcctaatacagctatatacagatctatagtattttctattggtaaagaaatcccttgcttatctaatattaagagcaagcgttctaatcctaatccaaaaccaaatgctggtgtttctggtccaccaaaataggatactaagccgtcataacggcctccagcacagatcgttaattcattatcttcaatctcagtgataaactcaaaaatagtatgattataataatcaagaccacgaaccatattagtatcaatgatgtatggaatatttagagcatcaagcatatgacacacagcatcaaagtgggcttggcttgactcatctaaataatctaaaatagaaggagcattttcaactgctagtttgtcttctggctccttagagtctagtacgcgcaatggattttcattcaaacgacgttgactatccttagacaattgttcacgtatgggtgttaagtaatcaataagagcttggcgataggcctgacgactttctggattccctaaactattaagatgaagtttaacgtttttgatacctaaatcttcaaatagatgatgtcccattgcgattgtttcaacatcagttgctggattatttgatccaaagcactcaacgcctacttgatgaaattctcgtaaacgaccagcctgtgggcgctcatatcggaacattgatccaatataatacattttggttggtttttgaacttctggtgcaaatagtttattttcaacataagaacgtacaacaggtgctgttccttctggacgaagcgtaatgtgacgatctcctttatcatgaaaatcatacatctcttttgtaacgatatccgttgtatccccaactgagcgactaataacctcgtaatgttcaaacattggtgtacgaatttcatcataatgatattgtttaaagagattgcgtataacattttcaacgtattgccactttgctgattctccaggtaagatatcctgagtcccttttggtttttgaagtttcataagtttacctcttcgattagttttctctttaaacattctaccattttttcttatattttaaacaagcatatatcatttgctttagtttgatagtattttcaccgtgaaattgtaaaaataaaaagttttgtcaagtaactttactttacaaaaaagatatgttatcatagtgaagttgatgaaaatcaaaacttacacatcgaaaggaagaataagaaaatggcaaaacctgcacgtcacacttcaaaagcgaagagaaacaaacgtcgtacacactacaaattgacagctccatctgtacaattcgacgaaactactggagattactcacgttcacaccgtgtatcactcaaaggatactacaaaggacgtaaaatcgctaaagctaacgaagctaaataatagaagggagataccatgcgcgtaaatattacacttgaacataaagaatctggtgaacgcttgtaccttacttcaaaaaacaaacgtaacactccagaccgtcttcaattgaaaaaatactcaccaaaacttcgtaaacacgttgttttcactgaagttaaataagacatcatacagaaagcctatgaaatcaacgtttctaggcttttttgcttgcttaaaatgtggttttgtctgatttttgtctgattaaaagtatattatctattcaaacatctcctatatccgtcatacttccaagtttttatggaatcactttaaagcaacttttttccacttgcgaatcttagttctaaatgttccgaaaggagctaccgtattaatatgaataaacttataaacttcccagactgcattcttagtcgcactatcagcccaatttctcatatgaggtttaaataggacttcgtcgctcattgaatcaatcatgttacctatagcatctacattatcattgagttgagccgtaagttctttgatggttagactagcgtaggtctcagtaaaatgctgatatagctctccaagttgattccatttaaacgtctcagttggtgttttaacttctaagccactctgttcatctgactcccattttagtatcagggtagtccagccaacctgataggctagattctccgctggtgtcctatcaacctcatcaattcttaaatctttcaacttctcaggaatgtcattgaattcagcaatatattttttatatgattttagtacttcttccttaagttcgtttttatctgaatatgttctcatttctttcctctttaatttagtcaagttcattgtatcatattcttttctctttttcttaggaagtacagcttttataattctatatatcaaatgaattttattcaatcaacttttctagcttttcaactgcccctctcatggtatctttttgcttcttaatcacatggagatagacacgctcaatctccttggaatcctccgagtgtccgacaaattctcgaatagtagggaggtcaataccttcgctagccataatagagataaagctatggcggaacatatgagggatgacatgaatcggtctgccaaagtctagaaagctatcgatatccttatagggcttgcctgctttcttgttatactttgctgactgactagagccacctctcaggaattgtgagagttcgttgtgataaagcggagagccttgtcgattacctgccctaatataggttctagtaaagagataccctaagtcttggtaagtcggactgaattgagcttgaaatttatttctgtcaatatagtgacgtagaatcttctcaacctcagggctcattggaatcgtgcggacactttccttggtcttaaggtctgctcggtagcgttccttttcgtcaagattgagtgcttccatcatatcatccgatttattcttacttgccctctgccaatgaacttttatccactttttctcaaaatcaagcatgtcttcatttaagcctaaaacctcacttggtcgcatgcctgttagaaaaatcattctcaatacatctgcgataagttggttatcaggtcgattagtccagctctctatcaggcggagaacatggttaacctcacttgcttctagatacttctctgctatatcttcacgcttcttgtcctgctcctcactctttgtcagaactcgccttttaaccttattgctggcaatcgggtcttgtgtaagagttatctgtccattttcaactgaccagtcaaaaatcatcttaaggtagatatgcagatttctcgccatgtgcatagaagaagcattgataagattttgaatttcatctgtcataaaggcaaatttcgtgatggacattctggtatcaaagttcggctcaatatagcgattatagatagtaacccttgttttaagggtattattggctggcttgaccctttcatgccatgctttaaaggctttaccgtaaaaatttccatctttatcaaatggcttggcgatttcttctagggttaaaagtttcttggctttcttaggcttaatgcccattagctcggcgatatagtcatcaactaatttattcagttcttgcgtgacctgagtaattaattgtgtgtttttaatatcgctgaccaagagacgttctttcccagaaggtaactttttgctcggtgttgccttggtggtaaaccaccctttactagcacctgtagaaaggtatttcttatgagattttttagtaatagggtgggtgaatcgcatagcgaatttcaccaagacattacccgccttataagggtctggtcgccaagaactgatgataagtactcttgaaccattatctctcatagggactacctacgccatctttgcgacatactgattggcaattttgtagtcaaaccacgccacaaagacttctgagtggataaagacattgccgtgtgttcctttgataccgaaagcgtaagggctgtctttcatctgacgaatgtaactattaagtgttgcaacggtcatgccatgccagagctcatctagaaagacggatttgcggtaccagttacgggttaagtcaaaatcatgttctgtttttaatgttgccattgaattctccttctgttttagttataatcaagttagttatttttggaaaggcgatttgtagcttgctacaggtcgtcttttcttatgccccaataggctgagcttagttgctcttgtttgtactgctgaatgtcagtctcgtctgtttcggttagcttagaaatccccaattcaagtaagtgctggatatagctatctgccttttcttgcccgtgagattccgccttagcgacatagagttttccgagtgttcgtgagacttgtttctctgtccacttctcagaacgttttagggtaggttttgtccgttttacgcttaagaccgtcttttcttgtgtctctagatagtcattccaccattttaccgtctttcttcgccaacggttagaatccttgtccctcgggctgacaaaacggtagtgtccgttaataacttcaaagtaaatctctttgagcggtcgcccctctttaatctgtttggctagtaaatttgctttttcctgccagcacctcagctctgctcttgtccatgataagggcgtatttggcaattcttggtctagcttttgttctaacaatttgttatagacacaccattgctgagtacctctaacaccaatcgtaaccatttcaccgaccttttcaccattttcaagaaggctcttttcatggtaatcaaaggttttagcggttgatatgcagagttgctttttacaataactgtaaatgagtgggacggatagactgtcatcaaagatatcgttggcaatatctagtctcgtaacgttactatgacattcagaaatgcgtttcatcaaggttacccagttattgacattgttttccatatattcttcatactgacggcacccctgccctctcagttcgataaagactcccatctttgattgccagtccttattgaagtaaacctttatctctgagaaggaataatgccgttgatacttgtttatcccccattcattgaggacaaacttgtctttaggaagaatgaggattttctcaatgacatcatctggagccaagcctttaatcgttacggctaaatagtctaacatcactgagttatccatgtctaggctccaataaatttaatatcggttgccactagctttaagccaccccaattccctccaccattattgttggctcgccaaccaagatggacttctggattgacaagttctaccacaagggagtttaacccatccttttcaacggatttagccaacttgtcaagattgtctacaatctccaagcgaatgcccttaaggtcatcagaagaatagcccaagtctttcaaggcttgaattttgtctgtatcttgtacagagcaagtgattttagccacttcatctgtcgcaatgctttcgccattgacatttttatagactggtgcaacccgtgaagaaaggatagtcactttctttggaatgtcaaattgtgatttatctaatttcaaatcaccaacttttatggtttcgtctgttaagttaaattttgtcatgtgtttttctcctgttcataaaagctacgcctacatgaaatctgtcataaatcgttgatatcatgggctttataaagatttttttcgtgaaatttgcttcaaatcgctgaaccccttgcttatcaagggttttgaccacatttcgtgtatgtgtgcaccccctaatagggaacggggtgcaatttcaatttcgatttcagccgtttgccaccttccccacctgctctgggctaccgtattgaccactcgcccagcggtggggtggcgaaccgtcttcatcgtttgaagaaaccaattctcttagatgttttatcccctgtctctttctctaagttctgaattctgacaagaagcacttctaacttctgtttcaactcagttaggtttctttggtaatcctcttgaatttccataaaagaaacttctagctcgtctacaagctctctaatgggtttctgatggtcttttcccttggaactcccataaacgcttagaattgccctctcaagccctaatgaggacttcttatccgcgaccgcttgaaagtaggcaaggtcatcatctgtaaagagatagattttagaataagatttccgacccgttctcactctactttctttaaattgagtaccagtcaagctttcaatttttaatcgccactttttcagtgttgaaactgagttaagaccgtcaaccctatccacaacttcttgataatcatattcattcattagcttacctgtgttttctgattgagaaagtcggtcacaatctgcaaggctctagattcaatcaatcgttcaaatcccgtactcttgataaggtgatagagttctctgtcatctaaatctttgcagtcctctggtttgatgaaaactttctcttgtgtctctggcgagtaggcaacccactccaccatttgtagttcaatacttgtttgattcataattaccctcttttctgacgtttgcatccaactagcatttatccgaaatatctggtataattacagtaattagatttactgtccttgaacgatgtaccagattgttcaaggattttttctaccttcctttcttttttgattgttaagttagctcctttctatcaataatatacgattttatatacgattgctgtaaattttttgaacaatcctaatgctcattaaaaattatatacgaaaacatatacgatgtcaagtattaaccacaaaaaaatgtacgattttataaactactatgttataatggtctgagaggtaacttatgtttgaaatacttaaacctgataaaaaggctgttgggaaaagattgaggcaagtcaaggatgagttaaatttgtcttttacagattttggaaatcgtcttggactaaaaaaatcaaccatcaacgcatatgtaagaggagataacttagcgcctcttgaagttttagaaaaagtatcaaaaatctatggaaaacctgtaggttggttttactatggagaattggaagaatatattgaactttaccttagaaaacttggttatggtacattcctagatgaatatcctgagacaccgttaaagataaaggatgagctttttaggattaaagcaaatccaaaacaattaatcacaactaacgggggagtaaccattggaacatttgagaatcctaattgggaaaatgactttggttacccaaatgaaggctacctagatgatatcttttttgaaatgctttgtgaaactctaaagaactcaattagacaggaagctcaaacctacctaagtcagcaagaaggacttgacgatactaaaatcaaagaactctctaattactttgccaaccaaatctacatctcatatgattttgtcggaaatttagaaaatctttctaaagataaaatcaagcaagaagttaaagaaagctatgaacgtctgcttaaagattcacctcaagcaggtgtagaagttagctatgattccaattacctacttggttttctaataaatacacttgcggatagtcaaacaacaaggcaattactttcagatatgtcacaagcaacagtcggtatgcctttttcacaatttcatgagggacacgaattagttgaggttatccaatctgtcagaccacggctgatagaactttacaataacacgacctttgatgattggactgactgggcggagaaatgattttagaaaggaagatgcaaatggataacaaattcaaaaatatcccaaaacggcatttaccacaaaaactcccatttgactacacgtcaatatatactgacccacaaatcattaaattaactactagggcaaatattgcaatcggtacttacgaaggatttctagagtctatcattaaccctatgctactaatctcccctttgcttagccaagaagccgttctctcttcaaaacttgaagggacccatgccaccttgaaagacttacttaattatgaagctggtaataaagtagatattgagcgtgatgaattgcatgaaatcattaactaccgaaaggctctcttttatgctctagaaaacatttccaccatcaacaacatcgattctaaaggattaccgttatccaatagaattattaaagaaatgcacaaaattcttctagataatgttagaggtagtagtaaaaatcctggtaattttaagagaagtcaaaactatatcggtagtgtatcctcgatttcatacactcctgtccccgcggaaaaaacaccagaatacatgtctaatttggagcaatatatccattatgatgacttagacttattggttcagtcagcaattatccatgctcaatttgaaatgattcacccttttgaagacggtaatggacgaattggacgattgcttataccactattcctgtactatcaggaactactttcttatccaacattttatatgagttcgtattttgaaagagataggtctctttacatatcacacctatcaaacatttcaaaagacaacaactggaaagactggtttgagtattacctagaaggagtgatattgtccgcagaagagagtacaaaaaaagctcaggacatactaagcctatataacattatgaaggaacaagtcatccctaaacttaattctgtttcaggtatccagcttcttgactttatattctcggctccaatctttaaggcagaacaagttagtgaacacctaaaaatttctaagagaactacctatactttactaaataagttaattgatgaaggttatctttcaacagataatgctcaaaggaatagaacctactattgtcctcaacttctttcaatcgttcaataaggtatctcttaatgaagtaatgttcacctctgcttcacttatttcttttttagtgaagcaaaagtcatctttacttctcttatctatttcttaatgaagcgaaacctgttttggcttcacttgttttttattatgtgaagcagagttggatttcgcttcacttagcgactggtaagtgacttatcatttatactttatttttatactgaataaaaggaattttacccatgcccaagaataggataaacaatttcatcaatataggaggcttaatcttagtaatctcttttctactattagtccttgatatagttaatcttccaacgaaatttggttttaatataaagactttaaatattgaaatttggaatatttacgctacgcttttaggaagcgggttaactctgtatggtgtaattataacaattaacagtcagtatgagtcacagatagaggatactaaacggattgtaaagcctatgattaatgtgtcacctgttgacgagtatagctacaaggataagtatattcaatttgactttatattccccaaagcatatccaaaccttttaagaaaggataatattgacactccaaatgtcaccatctctctggaaaatcttggaactagagaattgtataatttatatataggaaattttgaagctacttattttgatgatggtggctattattatcaacttaatccaattttatattcaaaccataaggtacaacttaatcttatgttctatgaaaaaaatggttatcttaaagaatttaatcaggaagataaatttcatttgctcatttctcctatcaaattttcaatctattttcaggattgcttgaataattggtacgaacaatcgtttaaattacgtattttccaccaagttcaagcagacaggtcagatgaagaaaattcactaacagttagtattgaaagagtagagatatattctgcccctaaagaaatttctcccgattcacttccgtggataactaatccaagtaagttatgccagtttgggtgaatcactaataaagcgaccacactcttatccaatttattagcagtgaactaaattttgtctgatttttgtctgattaaaactgatgcaagggcaaaatcactctatttcatcaataattgaaagatttaaaagcccgtaaaatcaacgtttctgaacgtaacaaatattgctaaatcacacattacgcttactgaagttaaataattgattataaaaaagcctatgaaatcaatatttctgggctttttatttttaaaaataaaatctgacaaaaaagtataaatttacctcttaccttcaggtagttagtcattcttttaaaactcacttttttataactgaaaatattgttcttaattttaaaaattcattttagattcattttacgactatatactcagaagtaacaaacctaatccaaggtttgaaaaaagaaagaaggaagtcagtatgacaaactataaaaacaactttaaaaaattcatgagcaataaattatacgtagggttagcttccattacgctacttggtattgggggagctataggagtaagtggagctgcattagcgcataaccatcactcagaacacatgtcttttgaacataagcatgaaggacacgataaacatcacgatcatagagaaaaatactcactaaaaacattaaagaatatctcgacaaaaatcgattataagactgccttagaaactgccaaaaaagaagctcgctcaggctttatttcacaaattgaattaaataccaaaggtgatacacctttttatgaaatcaaagttattgataataaaatagctaaaaaatataaaattgatgctaattctgggaagatcctttcaacaacatcagataatcaactcaattcaaaagatgcccaattaaaacaaccaagtaaagatattcagactgcattacaagctattcaagcaaaatataaaaatgcaaaaataaaagaaatttctcttgcgaataacaaatcaaataagctagtttataaagtaaaactacttgatggaaatactcctaagattgcccaatttgatagtgataaagcatcatttataaaggcaaataagcttaatacaactcataaaaatcacgactaatactagtgtattaaagggaataggacctcagtactccattcccttttgtgatataatggaaaaaagccatacggaggccaaaaaatgaaaatccttgttgttgaagatgagtttgacttgaaccgtagtattgtaaaacttttaaaaaagcaacactacagtgttgacagtgcttcaaatggtgaagaagccttacaatttgtttcagtggcagaatatgatgtgattatcttagatgtaatgatgccaaaaatggacggcttcacctttttaaaactgcttcgcaacaaaggaagtcaagtatctattcttatgttgactgctcgagatgccgttgaagatcgtatcgcaggtctagattttggtgcggatgattaccttgtaaaaccatttgaatttggagaactcatggcccgaattcgagctatgttacgacgtgcaaatagacaagtatcttctgatgatattcaaattcaagatataacaatcaatttatctacaaagcaagtttggagaaacgacaatttgattgatttaacagctaaggaatacgaagtccttgagtatttggcacgtcacagagaccaagtcctctctcgtcatcaaattcgtgaacacgtttgggattatgattattatggagagtccaatattattgatgtccttatcaaaaaccttcgtcgaaaactagataacaatcgagatggatcactaataaaaactaaacgaggtttaggatatgttattccaaagtaaaataaattaccctaaaaagtctagcatcatcactcaaattaccctctggtacagctcttttatttttatccttgttatcggtgtattaattggttcattttttatttcaaaaagcattgctgaaaacaaatctaaaaaaaatttagaagctaaagctgtgcaaatgagtcaagcgttagctaaaggtcatcggtatgaggcttttgaagatggaatattttattcagtctatgaccaaaatggaaaagttatctattctggttttccaaaaggatttaaaagggatttagaccatcaacataaacataaaaagaaattatctctattttccatggagaatcgtacctttcagtatgttgatattccaatttctgggaaaaatcagtggttacgtgctatccgtactgttgacagactggataagcaattaactgaattgttatttagtttgggtatcgttcttcctcttatgttgattataataactgttggtggctatttaattttaaagcgcacttttagaccgattcaagaaattactgaaaccgctcaatttattacccaaaatgaagactatactaagcgaattatcactaaaaataacgaaaatgaattaactgagctagcagctgttatcaatactatgttggcttctattgaatcatcatttgttcgggaaaaacaatttaacaatgatgtttctcatgaactacggactcctgtaacagttatactttctgaaagtgaatacggaaaaaactacgcagaaaatttaagtgaagcaaaagaatcctttgaggttatacaccgtcagtcactatcaatgaaaaaattagttgagcaacttctagaattgactaaggcagaaaatccattatcaattcagttagaacctcttaatttctcaattatgatgaagcaactagtatccgattcgagtagattattagataatacccctatacaccttgactctcaaatcgaagatgacctttggattataggtcaacaaacactactcaaacggctttttgataatctattttcaaatgctattaaatttacaaacaatcatatttctattagtctaagacagtccgataatcaaattgtcttctctattaaagataatggtctaggtatctcagttgatgaccaaagtaaaatttggaaccgtttctatcaagtggactctgctcgaaccaaggatagtcagtctggaattggtttagggctatctttagtaaaacaaatcgctacaatacaccgtgctaaaatatgggttgattctaaacctgatgatggcagtcagtttacgctcacctttccaaaattgaagaaagactagagaaaggaaataaaaaaaacgatagattacacctatcgttttttttatttaacttaaactcaatttattatatctcttcagatatttttgagactaatagctgaaatctttaaagtattaaaacttgtagaactaacaaaccgccaccaaatattaggaggaataaaacaaccggccacacaaattttagccaatgggagtacttcatatctaacatctgcaaggttgccataactagtccagtaggtgctaaaaacaacattgcatactgcccaaattgataagccattactactactgaacgaggaatcccaacagtatctgcaagaggtgctagaattggcattgaaagtactgctaaacccgacgaggatggaacaacaaatcctaacacaaagtagataaacatcataacaatgataaagacagagccactaacatgtgaagctaattttgaagctgtgtaaagcatcgtatctgatatataaccttggctcaaaataatattgataccacgcgctaaaccaatgattaatgaaaccccaacaaggcttgatgcaccattaacaaactcatcaacaacatccctttctccaataccatttgccccagttgctgttaaaaacataataataattgtaatagctaaaaaggaagaagccatggttggaaaccaccatccctgtgacattactccccaaaccatcaaaggaaatgaaataacaaataaacttaaaataattttttgtctaatagtaaagagtgagggtgtatggttagttgtcatgccccatttagcattaaattctactctatcttcataggaatatgaaaactctggattcgcttttatttttttagcataccaatgtagatacaccacaacaaaaatagcacctgcaatacaccctgctgtacgccatgataagccttctgtgaaactaataccagctgcatttgaagcaataacagaagaaaacggattaattgttgaaaatgatgtcccaacagaacttgctaagaaaatagcacctacacaaatgatagaatcataacccatggctaaaaagattggaactaaaataggataaaaagcaactgcttcttcttcaataccacatagagtaccgcctaaaaccatcaataaggaaactaaaaatatcaataaaaactctctacctttggttttctttgttaaagctagaagaccagactcaaaagcgccactctttctaactactcctatcatgcctccaagtaccatgataaataccataatatcaacagcttcaatggttccatttaccatactagtcgtcacggagccaatgcctgctggattttgcttcaaacgtttgtaagtatttggaactgaaactggcttactaatagcaccagaagtaaattctttaattttaattttgacattcatcttatccaactgtgtttgcgttgctggaacatgaactgtcttaccatttggatctgttactactagtttggatgatgctgtatcaaattgtaattttgaataggacccagcaggtatccaccatgtagccaaaaccgaaaagattgttaaaatgaataatattgtaaaggcacctggcattcgaaaacctttactccttttgttttcactgtttgtcattttttctggcatgacacgcctcctctataataaaaatagattgacttcatcagaaaaagtgcaaagatgaaggttaaataatcatttctttgcacttatctgagattacttagttatacgtgttcctaatttcccatctaatgcatcttctaaaccatttaatgaggtgattaaggctgttcctttcggattgtgatctaagaaactcatacaggctattactttaggtaacatacttccttttgcaaactcaccttggttaacgtaatcaatcatttgattctcattaacctctgttaaagctttttgattttctttaccaaattgagtataaacataatcaactgcagtgagaataatcaattgatccgcagctagttctcctgctaacagtgcactagatttgtctttatcaataacagctgcaataccttcataacctcccttattaatgacagggatgcctccacctccacctgcgataactagggtatcattttcaataagtgttttaatgctattaatttcgatgatttttttaggttcaggtgaagcaacaacacgacgataccctcgtccagcgtcttctacgaaagtataccctttctctatagcaatcttttctgatgtctccttatcataaaaggtgcctataggcttggtaggtgcgctaaatgcttggtctgattcatccacctcaatttgggtaataattgtagcaacttccttatttattccctcttgacgtaattcatttaaaaggctctgttggagatgatagcctatgtatccttggctcattgctccacattctggaaaaggaaaattagttccttgaccactctcagccgcaaaattcattcctaaattaatggcaccaacttgtggtccattaccatgacttacaacaatttcgtgtcccttttttatcaaggccaccaatgattttgcagtatgttttactaatcttaattgttcttctggagaatttcctaaggcatttcctcctagtgcaacaacaatttttgccatgaaaattcctcctaatcacctaaagttgctaccataactgctttaatagtatgcatacgattttcagcttcttggaaaacaactgagtgagggccttcaaaaacttcatctgatacttccatttccttcaaaccatatttttcataaatgtcgtatccaactttagtatctatattatgaaatgagggcaagcaatgctcgaaaataacgtttggattttctgtcatattaagcatttcttgggtaatacgatagggttctaaaagagctattctttctttccaaacttcatccggttctcccattgaaacccaaacatctgtatataggacgtctgaatctctgacgccttctgcaatatcagcagtgatttcaatagaagcaccagtagttttcgcaatttcttgacatttagagagtagttcaggatctggctctaattctttaggacaaaccaaatgataagtcatgcctacaatagaagcaccgatcatcaaggcattagcgacattgttacgtccatcacccacatacgtaaagcgaatatctttatagggcttatgtaagcattccttagcggtcagaaaatcggctagtacttgcgttggatgatcagcatcggttaaaccattccacacaggaactcctgaaaattcggctaaagtctcaactgtttcttgagaaaatccacgatactcaataccatcatacataccacctagcacacgcgcagtgtcttttgaggtctcttttttacccatctgactgcctgttggacctaaataagtaacatgagctccttgatcgtgagcagcaacttcaaaagcgcaacgtgtccgtgtagaatctttttcaaaaatcaaagcgatatttttaccaacaagtttttgttgttcaattcctgcgtatttagcacgttttaaatcttctgaaagttttaaaagaaattcaacttctgctgtactaaaatccaataaagtaagaaaactacggttacgtaaatttttcattgcttattgcctcctttttttttatactcttattgtagatatcgctttcaaaaataatcaaaattcatcaaaaatcttcaaaaaaactttaaggacatttatatgctagatatattatcagaaaaacatctagaaagaaggcagcgtattattatctctgcaatagctatcgccttagctgctcaaatcaatatctcaatacttgctgatgggtttattatgaccttatctttgttcattttgcctgtctttttatattttaatgacgacattaatccaattcttctctgtctaggaattacttttgcttctcctatcttcagaggaatcatattaagtatcgctggcgaggctgagattcatcaaataattgaattcgttttaactgatatggcgttttatatttgttatggcatcaccttttatactatttattggcatcgttcctaccgtaataaaggtacttttttcttttctatcattatttgtgattattttgccaaccttgtagaaattagttttctcataaagtttaacaattatactataactatattcgctactttatttgccatagcacttttgcgagcttttattagttgcgctgtggcttatacttatagttatctatcacttctcttacaaaaagacgatcacgaacgtcgatactattattttatgtggtcaacttcagccgttaaaagcgaggtttattttatgcaaaaaaatatcattgaaattgaaaacatcatgaaaaatgcttatttattagataaagagttatccaaatatcatctacctaaagaataccaacacctctctctagatatttcgcgggacgttcacgaagttaagaaagattaccaaaatattattaaaggcttaggaacctattttagtgtaaaaaatgaatcaactatggcattgaaagatatctttcaaattgttttatcttatactaggagtattattcaatttcggcatcaagatatcattattctcgaaaataataaatgtaatttgataatatcaaactattactatttactaaccattatttccaatatcgttttaaatgcagtagaagctattgataaacaaaaaaagggtacaatcagtgttcacacagaagaattagaagattttattaaaattgagattagtgataacggaccaggaatacctgataaaatgaaacacatgattttcaaacctggattttcgactaaatttgatgctaatggtgatatctatcgaggaatcgggctatcccacgtgcgtattttaatggaagagcaatatcaaggaacgataactgtttgtcctaatcagccaaatggaacaacatttacactgttattccgtaaaaatcgatttaagttaggagataatacgtgaaattctatattattgatgatgaccccactatcactatgattttacaagatattattgaagaagatttcaataatacagtagtcagagtgaataatgtctccagtaaagcatacaacgaattgctgattgcagatgttgatatcgtattgattgatttattaatgccaatattagacggtgtaacattagtccaaaaaatctataaacagcgttccgatttaaaatttattatgatttcccaagtcaaagataatgatttacgacaagaagcatataaagcaggaatcgaattttttattaataaacccattaatattattgaagtaaaaagcgtcgtgaaacgtgtcactgatactatcgaaatgcaaaaaaaattaaatacaatccaaaatctcctagaaaatacgccatcatatcaaaagcctataacgactagtaacctcactaaaatccgttcaatactcagttatttaggtattacttcagagacagcctacacagatattcttaacatctgtgaacttttattaaaacaagaattaaattttgcccaatttgattttcaaaaagaactttctatcgatgaacaccaacaaaaaatcattttacaacgtattcgtcgtgccgttaaaaaagctatgataaatatggctcatctgtacattgatgattttgaaaatgaattaacactgcaatatgctaatgcattgtttggatttcagaatatccataatgaggcacaacttattcaaggaaaaagcatgtatggtggtaaaatttcacttaaacattttttcgatgaacttattttacagagtaaaacgttttaagacttgtttaagcatggccttatatactataaccatcctaaaacttttcttttcataaatctccaacaaacaccttgtctaccgcaaggtgtttgtttttgcttctagtttatcgtttctgacaatttaaatgtcagatagttgtttgaatgtctactttatgctaatataaccctaatatcatacgacctacactcgttacgcactagaaagtaaattacatgatttcatttgaaaatgttagtaaatcatatggtgatcataccatcattgataatattagttgccatattcaaagaggagaattctttgtccttgtgggggccagtggcagtggtaaaactaccatcctcaagatgattaatcgtctcatcgaaccaagccaaggcgctattactttagatggggaaaacattacatcacttgatttgcgacaattacgcttagaaactggttatgtcttgcaacaaattgcacttttccctaatttaacagttggagaaaatatagaacttatccctgaaatgaagggctggtcaaaaggtgaccaaaaaaaagccgctagcgaccttcttgataaggtgggtttacctgctaaggactactttaatcgctatcctcatgagctctctggtggggaacaacaacgcataggtatcctacgagcaatcgttgctaaacctaaggtactacttatggatgagccattttctgctttagaccctatctcaagacgtcaattacaagatatcaccaaacaattacagtctgaattgggtattacattagtgtttgtcacccatgacatgaaggaagctatgcgtcttgcagatagaatttgtgttattaaggaaggtaagatagtgcaattggatagaccagaaataattcaaaataatccctctgaccaatttgttagaaccctatttgaagaggagaactgagtatgacaacactaatcactacctttcaagagcgttttggagattggactcaaagtcttattgaacacctccagctatcactactaacacttattttagcaactttaattgctattccactcggtatcatcattagtcattataaaaaaatcagtcatgttgtccttcagataactgggatatttcaaacaattccttctttagccttgcttggtttatttataccttttatgggaattggaactgtaccagctgtcgttgcactaattatttacgctctatttccaattttacaaaatactgtaacagtactgatgcaaattgatgctaatctcattgaggcagcaaccgcttttggaatgacacgttgggaaaggcttaaaaagtttgagttagctttaagtatgcctgttatcatctcaggcattagaactgcctctgttatgattattggtacagctacattagctagtcttatcggagctggtggccttggatcatttattttgttagggattgatcgcaacaatccttctctaattctcataggggcaatctcttctgctgtcttagctattatatttagtggtttaattggattactagaaaaggctagattacgaaccatagccgtttctggtatacttttactagcaggcttaggactatcctatgctccaaaatggatgcctggaacaaatactgcaacgataactgttgcagggaagttaggaactgaaccagatattttaattaatatgtacaaagaacttattgaggatcagacagatatcaaagttaagcttaaacctaatttcggaaaaacaactttcttatatcaagccctaaaatctggtgatattgatctttacccagagtttacaggtactattacatcaagtttacttaaaaatcctcctaaagtaagtaataaccctaaacaggtttacaacttagccaaaaacggtattttaaaacaagataagttgtcacttttgtcacctatggcttatcaaaacacctacgctgtagctgttaaaaaagattacgctgaagctaatcaactcaaaaatatcagcgacctaaaaaaattagataaactaaaagctggtttcactttagaatttaaggatagagaggatgggagtattggtttacagaaacattatggtttaaaccttgatatctcaaccttagaacctgctttacgataccaagctatcaatagtaaagatgtcaatattattgacgcttactctaccgatagtgaattaatccagtatcaacttcaaattctcaaagacgataagcatctatttccgccatatcaaggagcaccgctactaaggcaagatacgattaaaaaataccctcaagtaaaaaaagctctcaataaacttgctggtcatatcactgaaaaagaaatgcaagaaatgaactaccaagtagctgtaaagcataaatcagcagctacagtagctaaacaatatttaaaagcacatcatattataaagtagattcaagcaatcaatggtattaaatgatttaaaaagagcatgtcgcatgacatgctctttttaattgccaaataaagcttatttaacaatcttaattttactatcttccattaatagggcacaaatagcacaaattaaccaggacgaacgagaacaagaaatataacgttccgaccacaatggtgtaaacttcttcttatacttgtgtaaaccattaaatgagtagaaatgactaccgaaatgatagacaagatacgccattctctctttagcaaaacttgtttcaacgcgaccaactcctgataaaggtgccatccccaaatcaaaatagtggtatcccttctcttgataataagagaataatgataaaaagaggaaatccataacgccattcggaattttctgtttatcgtgacgcattaaatcaatagagataatactcttttcatagtttggcataatattagcaaaagcaacaacttcgtgttcagcattttttaccaaagctattggggcttgttggaaataatctttattaaaatatcctagtgagaaacctttttcaggacgtccttctaaccaagtattagaaatctcttccaaactatttagtagctcttgactatgtggcgattgtacaacttcgaaatagaaaccatccttttcaactctatttagggcatttctgaaaggtttgtacttattccctttaagagtaaacgtttctaaattaactaaagcatcctcaccaactttcataaagtcaaaaccatactcatgtaaaagtagtgtcaacttctgtccaatactgtaaaaaacaaggtcatagtctagcttatcagcatcatcaataaacgattcaatagcttcacgaatataagtgtcatcaccggctggttcccccataataagacatttattattgacaattacaaattggaacgcaacgcaatcttctccatttttttggtaccagtagagccttttatcatttaaaaaggctaaaccgctatccgaagaaccaccgtaagcttgaagtagttttttataacgatccacattgaacacatcaccaatctgacaagattttccttgtaaaatcttaaccaaacataaataaacgagagtaagaatcaacgtagccaatgctatcggctcccatgctatgatataatgcaggcgttcaatactaccacctgtaatatgagccctgatagggaatagtagtcctgcaatataaaatagaactcccattaaactaacgataatgattccatccttaatacgctcttcccagctataaataaattgttttttatagagagttggcttaatgactaataagcctaacaatagtaaaataaaccagaaagatagtcgccaactaatatgacctaaattaagataaaacaatgtcaaagtaatccagataatagcaattggaaaagcatttttcactttttgatcaatagttctagctaagagaataaaacaaacccccagcaataaacctggaaactgccataacatttgttcttgtaatgggtccaagcctagcttctgcaaccacataatataagtaatattttcaaaaaatgctgttgaaaatattaagaatgcacctaaaatacgcatcaaatggctcaccatggtttgtagaacagttgatactaactctttcgggacattttcataacgttgatttatttgactacctaaataatggataaagaaatagatacctgcaaagaatggaataatatagtaggctaaacgataaagtaataaccatgcaaccacagtttctttaggtagtccctcggcagcaaaccctgtaaatagaactaattcaaaacttcctaatccaccgggaataagggatacaatcccgacggcacaaccaatacaaaatagtggtaaaattttataaactggtagatgaatgcccattaaataaccgataattataaatgctgcggccgcacatccccattcaaaaaaagaaacaacacctaattttatacgagtactagatggcatatctccgaaataatggcttcctttatgaccagaaatccaataaataacaggaaaatacatactagcaccaattaataccaaataatagtaatcaacactagctttggcatgaaaaatatggctcatgattaaggcaatcacactaataaatgacagaccagaaataagatagggtaaaaaacgagtcacttctcttaggtcactcttctcttgaccttttttaccataaaaagccatgcgcaacccaatatcgattaagccaccgaatcctgacaagttattaaaagtgttgatacaccaactagtctgtaaaatataccttttgcttttatctgtacgtaaaagtccattcagtacaaagtcatatccggttgtcggtaagacagcgataacccccacaaggataattaagaaaagattcattggagataattgcccaaaaacactctttagttgctcaacagaaatagttcgtttcaaatgaatcatttcaacaataataagcactaaaacagatataaaaaatacaattttaatcacagaagtcagtgatttgactttttcaattagctttttcaacaatttctcctttcaacgtatcgttgataaacttttttgcaataatattaaaaacatgggaatcttgcttaataatgtgatgcccaaagccaactaaagaataaaactccccccttggaaaataagaagcaagtttcttagaatgatttaacttaattatgtccttatttccaaccaaaaccattacaggagttgacacatgctgtaaatcagctggactaatcttcaaatcctccaacataagcgaaataacttgagctttttgcctcatatacggaaagagtttccctaaatagtgaaggaatttataggcaatccttactaaaagaatatcccaccatcgctgaccatgaatagtcaggttccctgaattaagcaaaagccctctaaccatacctggaaacatcgtttgaaaaactaaagctaaattggcaccatcgctatggcctaccaatataactttatcaatctctaaatgaactaagatatcctttaagtcaactgctatttgcctgaaactaatggtatttagctttgcatgacttttgccatgccctctactatccataacaataacttggtaatacttagaaaaatatgctatttgcttatcaaaatagcgactacttaagctattgccatgtaaaaaaacaatcggttgaccttgaccaacgacacgataataaatatctgaaccatctttagtatgtaaccagttctcagtcataatcaaagtcacctctctttgaattcgtagttatattatactatttttaaagacaaattacttaaactacctgtattatgagaaaaaaatgattactaaaagccgttcaactaaatcgaacggctaagtagtattaaaataagaatgttaaaagagctaatataggtaaaccaccctgttttaataagatttttttatcaactgtcaaagcaccataaatagcaactagcaatacattgattaaaaaaacagctacaatttcttgattctgtgaaatatataacccataaaggaggaataggccaatcaagccgttgtatacaccttgattcttaaaaagtttaataacgggtaaatatgacaactcttctttagacatactaaaaatcttcccagtcatatttgactgggtggctaacgtctccaaatacataatataaaaatgttccaaagcagttaatgttgcaataattattgttaaagtagacatatcttctcctcctaaatactttgacataccatatcatactgttagtctatcactagatactttctattaatcttcttgtttacgataaataagaagagcaagtatcatcgatgatactaaaaagattactagcattctccattgatggttaacgtctcccgtcaacgagatggtctctcttaatcctgaaacagagtaagtcatcggtaaaaatggttgaattgtttgaaagaacttaggactcaattctattgggtaagttcctgcgcttgaaccaagctggaataataatattaataacgacaagaaggaaccatacctattatcccatcccactaaagcagttactaatgccatcaaagtccatgctgtcaataggataataaagtaggtttttccagggtaatctggtttaagacctatgaattgaactgcaaaaaataagatagttgctgctagagttgcaatgaatccattgattaataatttatttttagcccaactaaaacgattagctggctctttgccagataaagctttcgcaaaaataacattggctgataaagctaccaccatcaacgcaactgaaatcatgtatggtgccattccaacaccattcgtatcaacgctatcataatcttcatgcttgatagtgactgggctagatactgcattggcattatctttatttacagaaaccatggacaactggtccccagctttccccaaagaacttgataattgagaaacaccacctgacaactctgtcaacccatctgtcaactgatgtcctcccccagcaagcttattagaaccatctgcaattctatcagaaccactagctaattgccccgctccgtctctcaattgatccgatttactatctaaagtttgagctccctgacttgctttttgtgttcctgaaatcaattgattggatttactatctaaagttactgcacctttgcgtaattgccctacagcattcgtataatccgtgattccttttgtcaaggtttgactaccttgatataactgcttagtagccgttggcaatttttgaattttatctaaatctgagatagcttttaatactaaattgttagctgttcctgacaaagtttgaagattttgtgatccattattagaaggggctgaactagatgcttcactaagcacagttttcatattttctatatttgaagaaatatttgctgcaattgtctcagctgaagtaggtgttccagtaaccgctgaggtgatttgagattgttgttcaggggttaaacttttaaaagctgacgttgattgtaccgcagtcatttgcttttgtttatcagcagcagccgtattcatcaaagcctttgtacttgattcaatagttgataaaaaattaaataacttactattagtatcgctatcagtagttgctgtcgattgtaaatttgtaataatctgatttagattctttaatccatctgaaaggttctgcaaagtacgttcttgctctggttttagttgagttgcttgtgacaattgttgtaaaccatccgtcaacttttctgatccttccaccaatgcttgagacttatcatctaatttttgactaccttcactcaacttatgcacacctgttgtgtaagcagtaacaccatctgataatgtttctaacccgttagatagggtccccacaccatctgtataaaggtttattccactatttagtttattagctcctccagaaaaagtttgactagagcttgctaaaacatctaaattacttgtcaaggtttggctcccatcctgtagcttattagaaccatttaataattcttgactcccatcagcagctttattgatacctgttttcatagaacccatatttttaaaaactgattcagtataagtccctgtaatagattctgctacctcatcttttagtttattagctgctgtctcactcatttttgaagctacaaaactacgccccttagtagttttataagtaatatttaacctttctggtttttctgtcatgagagttgtcgcttttctagaaagatctttaggaaaggtaataaccatataatagtgacccttttctaattctttttctgctcttttagctgttgtaaaatggaaatctaagctatcatttttagacaaattgtcctccatatctttgccaattgaaatagtttttccatttaatttagccgatttatcttggttaacgactgccacaggtaaatttttagtattcccataaggatcccacattgagcttagaaagataacattatatagcgttggaatcagtgcaaccccagccatcgtaatccataattttgggctttttatgattgcttttaattcgtctaacattttttctcctattttggacatattgttcatttttttgataaaatatattatacagtgatgatagataatttcaagataaaaatctcgtttttggacactgtgtttaaaaatgtacaaaaatattaaggggtaattaatatggtaaacgatacgaggagagaaaaaacaaaaagagctattgaagcagctatgattacgttattaaaagatcagagcttcgatgaaatttcaacgattaatctaactaaaacagctggaatcagtcgttctagtttttatactcattataaagataaatatgaaatgattgatcaataccaacagtcactcttcaataaagtcgaatatatttttgatcgcaatcaatttaaaaaagaagatgccttgctcgaaatttttcaattcttagatagagaatcattatttgctgctctcttaacccaaaatggaacaaaagaaattcagacctacatccttaataaattacaattaatgctttctaaagaattacctgtggtcaatccagatgcaacaaagtctgatatcaaccgtttgtattatagtgtctatctcagtcatgctatttttggagtctatcaaatgtggataacacgaggaaaaaaagaaagccctcaacaaattacacaagtgctactcagtttattacctcaaacttaaaaccagccttccttataggctggtcatttttagttaggtttattttatcctcattataggatagcaacactaataaggactgacattataaatgacgatacatttgagaagacatatctaaaaattggcctacaagctcgttatgttctcctataaaatcaaagagctgatcctcactcagtacaccgcatttgagattattttctgtttgttctgatagtctaaaccagtcttcgctaccataaaattctcttaatttcacgtaatcttcatagtgcttttgaaaatcatctatagcttctactaatgcattgattctaggtttgaagctatcatacttctcttccatttcttctatttttaatctatcatttagattcataataaaatctccttagttatataagattcgacgagataagttatcattctcaagtatttgtaacgttaactctactatatcctttttacaaagtaaaaaattactcattacaaactgacagtgttgatttttattctaatgttagtttaaaatctttttggttcattaaatataatgactcactaaaaagtatatagcaaaaaaagcctataaaataggcttttaaagtatgtaatgtaataattaaagcattttgttgtagaattcaacgacaagtgcttcattgatttctgggttaatttcatcgcgttctggaaggcgagtcaatgaaccttcaagtttttcagcatcaaatgatacgaaagctggacgtcctaaagtagcttcaacagcttcaaggattgcaggtactttcattgatttttcacgaactgaaataacttgtcctggagtaacgcggtatgatgggatatcaacacgtttaccatcaacaaggatatgaccatggttaacaaattgacgagcttggcgacgagttgttgcaagtcctaaacgataaacaacgttatcaagacgacgctctaaaagaaccataaagttgaaaccaagagttccttcttttgctttagtagcttgtacgaacaagttacggaattgtttttcaccaagtccgtatgaaaaacgaagtttttgtttctcagctaactgcaagccatattctgaaagcttgctacggttattaggaccgtgctgaccaggtacgtagttacgacgtgccaattctttacctgtgcctgtaagtgataaaccaaggcgacgtgattgtttccatgatggaccagtataacgtgacatctaaatgtcctcctctaaaataattgaggaaataacgatttaaaaaatcctgattcgtgcaggggattttcgcctaaacagcaaagggtactagattagttaaccacctgttgacgagcttcatatttttctgctgttatttcacacaagctatattatatcatgaaaataatattgaatcaagtttttatgtctcttaaaccttaaatacaaatagacatctaataagtatttccaattataataagaaagattcttaattctaaccaccaatagagaattagtaaatttttttatagaaacaaaaaacctcagtcgaggttttcatactattctgctgactcgtcatcaaaataacgaattaaagttttctcagttaaaatatctgaataagtgtaagactctacataagtattatcaattgctcctggtacagctgcagtatccttatactctacgataaacaaagatgggtaaacttcaattaggcgcccaattttatttttttccctcttacgaccattttcgagagtaagttcgaccatctgtccctcatgtgacttgatatcttcttttatttttttcatttttgcaacatctgcaaatgcatcactcatattaacatctcctattcttcaaattgagctatactagaaaatttattatattccttttgaaacattaattttactgtcccacgcgcaccagcacggttcttttctaaaataacctcaacagtattatcttctacaatttcctctgcttcttcgccctctctacgataataatcatctcgatataagaaagcaacaatgtcagcatcttgttcaatcgatccagattcacgaatatcagataagaccggtcgtttatcctgcctttgctcaaccccacgagagagctggcttaatgcgataacaggaacctttaattctttagctaaaatcttcaactgccttgaaatttcagaaacttcttgctgacgattttctggtctagttcctgaaattaattggaggtagtcaatgacgattaaacctaaaccatcatcaacttcttgagataacttcctagagcgtgctctaatttctgtaattttaatcccgggcgtatcatcaatataaattggcgcatccgccaaagctccttgagcaatcgttacattattccaatcttgatccgtcaactgaccagttcgtaaactatgagaatcaaccattccctctgctgccaacatacggtcaactaaactctcagcccccatttcaagtgaaaaaatagctacaggtctattttgtttagttccaacattttgagcaatatttaaaacaaaggctgttttacctactgcaggacgggccgctaagatgattaattgatctggatgtaaacctgtagtaatcctgtctaaatctctaaatccagttggtaaacctgtgacatctgaggtttgctgtgaacgtaattctaagttttcgtaattaacttttaaaacatcagatatctttctaaacccgctacgattactgtgttcgttaatatcaactaaagccttctcagcggtggcaataatttcatcagaatcatttccttcataggccatgttgacagtatctgtcaacttagaaatgatatctcgcaacatggctttctcagaaactattttggcataaaactccgcattagcacttgttggaacactattaactaattcaacaatatagcccaacccaccaatgttttgaagatcaccttggtcatctaaaatatttctaacagtagcagcatcaattgcatcatttctatcagctaaggtaatcatcgctctgaagataactttgtgtgaatatttataaaaatcatctggacttataaattctctcaccataatcagtttctctggtgagataaagatagatcctagaacggcctgttctgccaacaggtcttgaggttgtactcttagctcagatacttctaccaaacttcattcctcctgacttgtcaacctttatcatctctcagtttacgcttctttgatatcaagcttaatctgtgaagaaacctgtttatgtaattttactggtacttcaaccttaccaatcgctctaatagtatgatctaaatcaatatgacgtttgtcaattttaatgccgtattgtttttgtaactcttcagcaatctttttggctgtgatagaaccaaacgtacgaccatctggacctaccttttcaataaattgcactcgggtagtttcggattctaattgtgttttcagctcctttgcctgtgctaaaatttctgcttgtgctttttcttcggacttttgttttccttttaattcaccgatagcttgtgtcgttgcttctttagctagattcttttttaataagaagttttgagcataaccagtaggtacttccttaacctcacctttttttcctttccccttaacatcttgtaaaaaaataactttcatctcaattaatcccttctattttcgactgtactattttctcttaaatcttcgtcaattatttccagtaacatacgtctaacttgctttacagacttgtcttgtatttgacaagcagcaaaactaaaatgtccgccaccaccaagtttttccataatacgctggacattgatattatttctactgcgcgctgaaataccaatatttgaactgtttttagtaataacaaaagtagcctcaatacctgccattgtcaacatggtgtcagctgctttactagctataacatgcgagtaaactttatgttcttctccggtagcaacaatgatgttatcataaatacgctcaccttttaaaatcaattcattaattaaacgatattcatcaaaatctgtagctgatattttttgaatagccatactattactacctaaaccgcgtaaatagcttgccacatcaaaagttctactcgttacattagatgcaaaatttcttgtatcaagcatgataccagccattaaaatacttgcttgactgcggcttaatttatctttagcttgttgaaattgaatcaattctgtaactaattcgctggcactacttgcgccactttctataaatgaaagaacagcattttttggaaaatcttcatctcttctatgatgatctaccacaataacatctgcaaacttgttaaagaattccttagataaggttaaagctgttttagaatggtctaccatgactaataaagaattttgagtaattaattcaaaagctctctcaacacttacgagacgtgtttcgccgtcttcttgcaagtaatcaattgctctttcaatatcagaattcatgtcatttgggtcataaactacataactggcattaacaatattactagcaaaaaattgcatccctacagatgcacctagtgcatccatgtccaatttcctgtgtcccacaataaagacactatcaactactttcaaacggtcagaaatagcagtcatcatagctctggtacgtgttcgtgaacgtttaatagttgaaacagcaccaccaccaaagtaaagtgcttttttactactatcattttcacgtactactatttgatctcctccgcgaacgagtgctgtattaagattttctaaagcaatttgcccaatttgattatggttaccatcaccataagaaattcccatacttaatgttaatgataaatggttttcctgagcgcgttttcgaaactcatttaaaatatcaaatttatcttttatcaatgtatttaaaacgctatagtcggtaaaaatatagtatcgatccatattgacacgacgataaaaaatatttttagactgtgtaaaatcagaaataaaactagtcacgaaggcgttaatctttgacatatcagcctctaacatagtatccataatatcatcgtagttatcaatggaaataataccaataactggacgtagcattgaactatcatagtttcttctattccccatgaaattatcgaagaaatagaaaacacccgtctctgtatccaaataagctgaatatttgttatcaccgtattcaaatgattgcccagccgttccattacgtctactagtaatgatatctttaacagtagcagactgaaaatgaccattatccccagtaaaaatcaattctgcataagggttaaaccactcaatatcatttgtttcaagatcaaattgtataacaccaactggcatttgttcaagaagactcttaagagaaacttctgtttgatcattaagtaattcaatttgttcaacttcagatagttcataagttatcttttggtaatataataaggcaacaacaaaagataaagcaacaaaaatagccaataatagagccgtataggattgaaataacctaacacaaatagctaatagtccaaataaaatcaggcctattaaaactaaatggacggttgcaaaacgaaatcttttcattaaataacctcttaagacctaattataacacaaaacgcccctgataaacaggggcgaacactattatcaattgatatttttacgacctttttgtcttccttcaaggtaaaccattaaaatactaatatcggctggattaactcctgaaatacgactagcctgacctagcgtttctgggttaatttttttgaatttttgtctagcttctgttgcgatagaatcaatgtcgtcccagtcaatatgagggggaatacgtttttcttccattcgtttcatttttgcaacttgatctaaagcctttttaatatagccttcgtatttaatttcagtttccaaaagttcaataaccttactgtctaatggctcatcagcacaaccaacaaaatccgttgctactgcatatgtgatttgtgggcggcgcataaattctttggcagttaaagcatctgtcaaaggtttaaagcccaattcttgaatccgtttatttgtctcagaaactggctttaactttatagagtctaaacgttctaattcattttcaaattgcatttgacgctttttaaatatcgcataacgctcttcatctactaggccaatctcataaccgatttctgttaaacgcatatctgcattatcatgacgaagaatcagacgatattctgcgcgacttgtcaacagacgatatggttctagagtccctttggtaactaaatcatcaatcatgacaccaatgtaagcatcacttcgttttaaaataagttctggcttcccttgaactttaagagcagcgttgatcccagcaaccaacccttgaccagcagcttcttcataacctgaagtaccattagtctgtcctgcagtaaacaaaccagcaattacttttgtttcgagtgttgctcttaattgatgaggcaatacaatatcatactcaatagcatagcctgtacgcatcatttcagcattttcaagcccttttatagaacgtaataaatcaacttgaacatcctcaggaagactcgttgatagcccttgaacataaacttcttcagtgtatctaccttctggttctaagaagagttggtggcgctctttatcagcaaaacgcacaattttatcttcaattgacggacaatatctaggaccaactcccttaacgattccagaaaacataggagcacggtgtagattttgattgatgatgtcatgactcaaagtattcgtataggtcaaccagcacggtacctggtcagtaatataatcttcatccctagacataaatgaaaaatgatttggttgctcatccccaggttgtatctctgtcttttcataattaatagaggaggcttttacacgaggaggtgttccagttttgaaacgaccaatttctaatcctaggtctcttaaattatctgccaatgtcacagaagctaaactattattagggcccgaggagtacttaagatcacctaatataatctctcctcgaagagcagtacctgttgttataacaacagattttgctgaaaatttctgattagttgctgtacgaacccccacaacctttccatcttcaacaagtatttcgtcaatcatagcttgtcttaaggtaagattttcttgcttttctacagtttgcttcattgtttgtgcatagagggctttatcagcttgtgctcttaaggcacggacagcaggccccttacctgtattaagcattttcatttgtatataggttttatcaatgtttttacccatttcaccacctaaagcgtcaatctctctgacaacgatacctttagcagagccacctatagaaggattacaaggcataaatgctaacatttctaagttgatagtggctagaagtgtcttacatcccatacgactagcagctagactagcttccacacctgcatgacccgctccaacaacgataatatcatagttttctgcaaattatgtgtcattttattcctttccaatttcaaagtctaattcattaaaacacaaaaatagccaaaactctcgaaaattgtacgtcaaaaagacttacaaattccatgagctttgaccatcatagttattgttaaatttattttagcatttatcttttaaaagtcaaccagaggggataggctatgttaaatgaaaaccaatttttatgcctgttattagcatctctatcccgatagtcatcaaaataagtcccatcattttggtgattatagtcattgcattttttccaagaaatttagtaatttcgtttgcacttattaaaataacatacattatcacacataatatggcaaaagcaagtatagtaatgagtttgccagataaaccaccacttgataaccccatagcagttgcaatagtacccggacctgccaaaaggggcattgctaatggtgaaactgccacattcattggatcatccttatgctcctctaggtttttattggttggtgaatgtataccattaatcattttataacctataatgcctaccaatattccaccagatatttttagggcggctagggtaatcccaaataagttaaaaagtaagtggccacttaatacaaagattacaataatgacaaaagcaagtaatactccttttgctgcaatccgacgtgaaatcttctgatcatcatcagctactaaagccataaaagctggcaaattagaaatgggattcataatggcgaaaaaagccatgaaagctaaaataaattttgaaatcatacgattacctcacttaataattaagtgtcaattaaatgtattgacagattttatcatcacgataagcctgatcaatcatcccaccgcctaaacattcttgttcattataaaaaacaacagcttgacctggtgtgattgctcgttgtaaatcatcaaacacaacccttgcttgattaccttttacgtaaactgtaactttactgtcaggttgacgatatctgaacttagctgtacattctagcttaaattcattaggcatatcacgtgtaaagtggatttcagaagctgtcaagctagttgacatcaatgagtcatgatagaaaccttgacctacataaagaatgtttttacttaaatcctttccaactacaaaccaaggtttattatctccaccatgttgcccaccaataccaaggccccctctttgaccaatagtataatacattaaaccagcatgttcacccatgtcacgaccatcaacagtcatcatacgacctggttgagccggtaaatattgacccaggaaatccttgaaatttttttctccaataaaacaaataccagtagagtcttttttcttagcggtcgcaagtcctgcttcttcagctatacggcgaacttctggtttttgtaaatgaccaagtggaaataacgttttttgcaattgctcctgagataattgacttagaaaataagtttgatccttattattatctgctcctctaagcatatgaactattccgttctcatcacgtgttacttgtgcataatgacctgttgctacatagtcagcacctaatgtcatcgcataatctagaaatgctttaaatttaatttccttattacacataacatctggatttggcgtacgacctgctcgatattctgctaaaaaatattcgaaaaccctgtcccaatactctttttcaaagttgacagagtagtatggtatgccgatctgatcagcaacagcagcaacatctttataatcttcagtagccgtacaaacaccaaattcatctgtgtcatcccaatttttcataaaaacaccaataacatcataaccttgctcttttaaaagcagggcagttactgatgaatcaacacctccactcatgcctacaacgacacgaatgtttgaattatcagtcataagaattctcccatcaaaaagttttatttttaacttaggcttgaagggccaagttgttcttagatcaatcatattgactaagaaacactataaaagtgcttatatattatagcactatttgttgtcaagttgtatgtttttgttgtgataaatatttattacattgcagtttttttatctttttatgatattttttagaaataatctgttataatgagaatgtacaaaaatcacgaggaaaaactatgaaacatttaaaatttcaatcggtcttcgacattattggtcctgttatgattggaccatcaagtagtcatactgcaggagctgtccgcattggtaaagttgtccattctatttttggtgaacctagtgaagtaacctttcatttatacaattcttttgctaaaacttaccaaggacacggtactgataaagcattggttgcagggattctaggaatggatacagataatccagatattaaaaactctcttgaaattgctcatcaaaaaggaattaagatttactgggatatcctaaaagatagtaattcaccacatccaaatactgcgaaaataactgttaaaaatggggataggagcatgagtattacaggagtgtcaattggtggcggaaacatccaagttactgagttgaatggattctcagtttcattaacaatgaatactcctactttaattatcgttcatcaagatatacctggcatgattgctaaagtaactgatattttatctgactttaacattaatattgctcaaatgaatgtaacacgcgaaagtgcaggagaaaaagctatcatgattatagaagtagattcacgagattgtcaacaagctgtcaaaaagatagaagctattcctcatttacacaatgtcaacttctttgattaagagaaagggtaactatgttttatacaattgaagagctggtagagcaagctaatagccaacataagggtaacatagcagagctcatgatccaaacggaaattgaaatgactggtagaagtcgtgaagaaattcgttatattatgtcccgaaatcttgaagtcatgaaagcttctgttattgatggattaacccctagtaaatcaatcagtggtttaacaggcggtgatgctgtcaagatggatcaatatttacaatcaggaaaaactatttcagataccacaatcctagctgccgttaggaatgctatggctgttaatgagttaaatgctaagatgggactggtctgtgcaacaccaactgcaggtagtgcaggatgtttaccagctgtgatttctacagccattgaaaagcttaatttaacagaagaagagcaacttgattttctatttacagccggcgcatttggtctcgtcattggtaataatgcctctatctcaggtgcagaaggaggttgccaagctgaagttgggtcagctagtgctatggctgcggctgctttagttatggctgctggaggtactcctttccaagctagccaagctatagcatttgttattaaaaatatgcttggacttatctgtgaccctgttgcaggtttagttgaagtcccttgtgtgaagcggaatgctcttggatcaagttttgcacttgttgctgctgatatggccttggctggtattgaatcgcaaattccagtagatgaagttattgatgcaatgtatcaagttggatcaagtttaccgactgcttttcgtgagactgcagaaggaggacttgctgccacgccgacaggaagacgttatagtaaagaaatttttggggaataaagtttatcaattttctactctttccctgaaaataaataaaaacgctacagctttactgtagcgtttttatttatttgttttagcaatctgtaattattgttgacaacagtgtaaagttaatttatagctattcactagtaaccccaagctgataaaccttgagcacgataagctttaatagctgaattaacttgatcctgaactgtagctgttgaaccccaacctggcatcgtttggaaaagtcctgaagctcctgaggcattagcaacattaggattaccatttgattcacgggcaataatatgttcccaagtagactgagggactcctgttgcagcagccatttgtgctgcagctgctgagccaatagcccctgcagtatttccattactcaatacttggccactcgtctggtgttgagcaggtctataagttgtctcagtaacagcataagcttgttgtgcctgactggtagcaggggtgttttctgttacaactgcttgttctacagctgcctcttcactcgcagtaacttgttgctgagaattagcttctgtagattgagaacttgattttggggcttcattagatgcctgagaaggttttggagcctgttttacatcttctacttttgatttagatgtcgccttagtcatttttgattttttggctacgcgaactttatctgcttttgacaaagattcagtagtaacttgtgaacttttaaagatgaccattacagccaaaatacatgaaaaaagggctactaaagtgatagctccataagctaaatgatgtttttttacattcaattttgataattttcttcttttattcatgttacctatattatactttatttgttaccttgcaattgaatagatgttaaaaatattacaaagagatttaattttaagtaaatctctttgttttatcaacttttattaataccagccgttactattccaaaatgatagcgctgccgaccaagatccgtaacgagaaaccacataattgtccgctactttttcttgattttcaggagataagtcgccatttaggtaagattgagacagttgatatcttccataatattgtccattctgtgcagtataactaccatttgattcacgacgagctatttcttcttttgcggctgaatcacttgaactcaaatttgatgaagaattcattgaattttcaattgttggttgagattttgcttctgcttgactagctgtagaattatccaattttaaaacatcacctatactgatgacatcagcgttactgatactattgagagacactaactcttgtaccgtagttttatgatttttagcaatagctgataaggtatcacctgatttcacggtataagatgctgcgcttactgaaagtggtaaagctaatgaagcacccactaaaagacctgccactcctaatttaaatggttttgattttttaaccgaggttattgacataatatatgctctctttcattaattgatacgcgtactatcataccttgtaaatattactaattgttttgccttagatgaaatttattacaaataaattgtaaattaataaagaaaaggcctccaaaaaacaatttttagttttctttaagtaaagttgttgagcttttcacattatataaatgaaaaggctaagaccataaactgatcttaaccttttaattttttaatagaaacaaactcaaacccaataataacataagtaatatactaaaagtatcccgaacagtccacttcaataaacggtacttactacgattggctccgccttgataacctcttgcttccatagcaattgccaacgcatctgctcttttaaaactagaagcaaataatggaatcaaaatagggataatagacttaaccttatgaattaggtttccctctccaaaatcaactccacgagctctttgagcattcatgatacgtgttgtatcatccattaaagtaggaacgaaacgtaagctaagggataacatcaaaccaatctcgtgtgctggtactctcagtacttccaatggttttaacaaagattcaacagcatctgctaaacttaacggagtagtagttaaggtaagtaatgtcgaaaagaagataattaaaacaaatctcataaaaataagtgctgcttgttgtaacccaaggctagtgatgctaaaaatccaaaacgagaagataacctgcccgccttgtgcaaacagcatctggaagagggttgtaaataaaataataccaaccatcggtttaataccattgaaaaaataggaaaattttatctgagataaacccacaataaccaacgtaaaaatgaatacgatcacatttgtcactacattatttgcccaaaaaacaataatgataaaaagcaacatggctagtaacttacttcgaggatctaatttatgaatgagagaattacctggtatgtaacgtcccaaaatcaatttatccatgcttaatagcctccacaaattcgttaatagtaattggtaaactaggtaaatttaatcccttatgagatagtctttgagcaaacttggtgattttgggaactcctaattgtttactttctaaaagttctacttcttgaaaaatctgttttggttgtcctgataaggttactttccctgcttctaaaacatacacatagtcagcataatccgctacatcgtccattaagtgagtcactaagacgatagtcattccttttttatgaagatttttaaaaagagtcattaattcttttcttcccttaggatcaagtccagctgttggctcatccagtactagtactttgggttccatcgctaaaataccagctatagcaacccgcctcatctgccctccagaaagttcaaatggatttttatcgaataaatcctcactgataccaactaaccttaatttttcttcagccagcctttcagcttcaatctgagaaataccaaaattttgtggtccaaaagcaacatcctttaaaactgtctcttcaaaaagctgactttctggaaattgaaaaactaaaccaactttttgccttataaatttgatttctttgttcttgtcccctgctttaatagaaaaatcatcgacaattacctcaccttttgtaggaatatgtaaaccattcaaaagttgcataatagttgattttccagaacctgtgtgcccaatgaacgcggtataggaagcatcttcaattttcagattgacgtcaaaaagggcacgcccttcaaaaggagtgccggcttgataggtataacttacatttttaaattcaattcccataattgttcttctaattccttctctgtaagatactctgtccctatatcaagaccattagcagccagttctgccattaacctacttgtaaagggaacatctaaacctaaactaatcaaacgatttccacgaccaaataacgcttttggagtggatgtcgactcaactttaccatttttcataacgatgacacgatcactcaatgcaacttcatctaagtcgtgtgtaattgaaataacagtaagattatatttttgacgaatagctcgtatcgttcttatcagttccaatcgtccctcaggatcaagcatactagtcgcctcatccaagatgataacttgtggacgcatagctacagctcctgcaatggctacacgctgcttttgtcctccagataaacgtgcaggctccctcattttaaattcagacattcctaccaaatcaagtgcttggtccactctttctttcatgtctttcaaaggaatacctttattttccaaaccaaaggcgacgtcatcttcaacagttgcccctacaaattggttatcaggattttgaaataccatgccaatcttgtgacgtaactcccagacattatcttcggttaactcttgtccatcaatgataatctggccagactccgcctctaaaagtccatctattaaacgaacagtagtggatttcccagaaccattatgaccaataatagatagccattctccttgtttcacatgaaacgatacattctccaattgataatgtgtttgattactatcatatttaaaaaagagattattaacggtaataatatttgtcattatttaaaagtatccttaaataagaagcctgcacctttaaaatagtcgtagcctgaatacaaggtaaagaatagagcaatgtataacatgatgttaccaagtgtcatccaatgtactaacaaaaaaataactgcaaacatttgagtagccgtctttattttccctggcatagctgcagcaagtactgttccacctgtttcaactaaaagtaaacgcaaacctgtaactgctaactctctacaaatgataatagctgaaacccaagctggtgctaagtctagtccaactaacatgataaaagcactcataactagcattttatcagctaatgggtctgcaaatttcccaaaatttgttactacttgccatttacgtgctagataaccatctaggtaatcggtcaaacttgcaatagcaaatacaatagctgcaacaatatgccaagttgtacttgttgttactgaagttaatactataaataacggaatcattaaaattctgactacagttaatagattcggaatattttctttcttcatcataaattctccttttggaaacatagtattcctatattatgttatttcaaaactagtaaaagacttttgacataccaactttatagatgtctaagcttccttattatatcaaaatttcagattatttacgaagattttggaaaaataacgaagtcagatgtgtcagcattatctaagaaatccttaccaatcgtaatgacatcttccaaatctaattcttcaacgatagatggcaaatccaaatacatcgtttttccatcatataaataggtgacgaattgcattgcgagattttcaatagaatctaagcttcttaaaaaatcgccatagagctctctcttaacgttttttaagtggctttcggtaagatcagatgattgcaaagcattttttagcaataacctcaactgagttgaaaaagcaattggctctgtcgtatctaaagaaataataacgcactcaaaatctggatgaacttcaatttctatatcaaaagaatcatcaatttgaccagattcgtaccagtcttggttaattgtagaagtccatcctaaaagcattgcaaaaaatagctgtaatccgattttctcttttaggtaagaaccatgtatcatatgatttgattttcgataaccaatagctaatttaggttttgtcactgtcatatggcaagagttgttttttataacaggctcaaggctaatagaatctcggtcaatattctgtgagtaacttgtgaaatgagaatttttttgaaggtaagttataatttcttgtggactaaattgtccaacaagaactaaattcatattagacaactgataaaagtctttgtgattttcttgtaaatcggttaaggttatttgagagattgattggtaatctccagcgatatcaaatgctaatggagagttggggtaaaggttcgataacactccttgataaagcctatattctgggtcatcttgatacatttcaatttcttgtttgataatatctttttctttagtaattgactcttctgtaaagtttgttgtcaatacaaagtcaagtagtatatctaagcagtttgtaatgtgacttatagttgaaaaataaaaactagttttatcaaaagttgtaaaggcgttactctcggcgccatatttagtaaattgagttgcagcgtcttgtcctttatccagttcaaataatttatgttctaagaagtgagcaattcctgccggataatgttctacacaaccattcctcgtatattttgtatggagtgatccaaaatttgctgtcaatactccaacagtttccttaaatgatggctttggaataaggtatacatttagtccgctctctaatgttaacttatatacttcctcctgaaggttctgataagttattttattaactgtcatcctagtttccttccaaaaaataaaaagcttgtaattttaattttgttgctacgctgacaatatctgattttgttacatcgtctactttgtcaatgaatagtgctgaagtatgaaactgatctaaataatgttcatgataaatgtggtcaactatgaccttaggattatcagaagctaaaacatagttcattttcaatatatcttttgtttgtttcaataatgtagaagaaaacctgcccatcttaatattattgaattgcttattaataagcttcaaaaaacgctcacgattctctttatcaatacctgcatatatcgtaaagagacctgtaaagctgtcaaattgactacctatagtataggctaaaccttgcttttctcgaatttctgtaaacaacaaggagtgggcaaaagcaccaaataaaccgttaaatactattaaagcaaaataatcttcatctttataagttattggaagatgataagccaattgcataatagattgattaacgtccttatcttctacttgacttctcgttatattttcataagtctgcgtataatcaaaagctaatactttgtgacgtggctcaaatgccatacgattaaaagcctgaatcattcgatagtcatcaaaatcccctacgacaaaaatatctaattgatcttccttaagcatcttctgaaattcttgataagctgtaaatgaattttctgattccactaaagatgctgtaccatacttaggtaaacgaagtgtcttattattgtagaataaagattttagtgctaagtcactgctataaaaattatcttcaatatcagcctctaaatattgaataaggtttttcttctcagtatcaaaaatagatgtttgatactgttctaaagaaattaaaggagaaaacagcatatcctccaagaatgtaataatttgttcaacgatattttcttgttctaaagtaaaggtatttttaacaaatacaatatcaatatcaacaatgtgaacaagacccttagtagaaatcttagttgataaactagcgccatataaggaagctaacttttctcgaaattcttgtaccttaggatacttagcatttgcagtaactaacatttgagcaacgagcgatctacgtgctactgttttattattaaaatcacctgaaaatcgaaaagtaagatgattagtcttaaattgttggtttttaattaaatgtagagaaacgccttcaactattttcattcaatatcctttgtgttctgtattgttagctaagattatatcatttttaaaggcgttaaaaaagattaaacatccaagatatgattaattctaaatttcaatcttcttcaaaattgacaaagtcgtcaaccaatatttactcccattttttataccttgtctccatatcataagttcaactcaaaaaataattttatgctataatgatgtgatatctaaaattggagattaaaaagtcatggattataaattatttgatgaatatattactttacaatcacttctaaaagagattggtatcattcaaagtggcggagccattaaaaaatttttagcggataatcgagtattgtttaacggtgaccttgaaaataggcgtggaaagaaactccgcctgggggatattattactattcctgatcaaaatatcgagatcattataaggaagccatcagatcaagaaattgaagaacgtaatatagaaatagctgaaaaacagcgtgtttcagcaatcgttaaagaaatgaataaaaacaccaacaaaggtaaatcaaaaactagcaaaaaaccagttcgctttccagggacataaaaatgtggataaaaaatatttctttaaaacattatcgtaattatgaagaagcacaagtagatttttcacccaacctcaatattttcattggccgcaatgctcaaggaaagacaaattttttagaagcaatctacttcttggctttgactcgaagtcaccgtacccgttctgataaagaacttgtacattttaaacaccatgatgtacaaattacaggtgaggtaatccgcaaaagtggccatcttaacttagatattcaattatctgaaaaaggaagaatcactaaagttaaccatcttaaacaggcaaaattatctgattatattggggctatgactgtcgtactttttgcccctgaagatcttcaattagttaaaggtgcacctagtctaagacgaaaatttttagatatagatattggacaaattaagccaacgtacttagctgaactttcaaattacaatcatgtattaaaacaaagaaacacttatctaaaaactactaataacgtcgacaaaacttttttaacagtccttgatgaacaattagctgattatggaagtcgtgtcattgaacaccgttttgattttatccaagccctaaatgatgaagcggacaaacatcactacattatcagtactgagttagaacatttatctattcactacaaatcgtcaatagagtttacagataagtcaagtattagggaacattttttaaaccaattatctaaaagccactcaagagacatctttaagaaaaacacaagcatcggacctcatcgtgatgatattactttctttattaatgatatcaatgctacttttgctagccaagggcaacaaagaagccttattttatcattgaaattagcagaaattgagctaataaaaaccgttaccaacgattatccgattctcttacttgacgacgtcatgagtgaacttgacaaccatcgtcaactaaaactcttagagggaatcaaagagaatgttcaaacatttattactacaacaagtttagaacatttaagtgctttacctgatcaactcaaaatctttaacgttagtgatggtactattagtattaatgaaaaaaaagcaacagattaatctgttgctttttaataagatttaacaataccaagtaatatagcacccataacaaaacaaaggatacccatgacaacccacttctgctctttcttcgtttttgtctcacctaaaaataaaataccaccaataatagagataattactccaagttgagaaaaactaaaagcaattgctagccctgctttagctgctgccaataacatgaagacattaccaacgccccacatgagacctgtaatcatatttttaacaacaacagcctcaaagttaacacgaaacttcatgaaacaaattgcacctagacacattccaacagccatgggtaaaataacggccatagcgtcgaacttcataatgttattaaataaaactgcgtatgagatgtaacctacagttgaataagcaattgtagcaaatccttttgaaaactcttgatgtgttgccaaagcttgttctgagacatcacgtttacttgagaaatagaagccgataactaataatgtcaacgctgtcaatcctaaaataaattggattggcttagtccattcatgaaagactaaagcaccaactaggcttccacctactaattgtgcaccacttgacagtggattagcaacagagactcccatatatttcattgcttggaattgaccattttggccgactgaccataggataccacctaagataccaaaaatccacaatgaggcagtcatctctggctgtttaaataaccatacgataatcgcaaatagcaatgctcctaaagtcattccaaatgtttgttgatttggacgtcctccaattttattactaacaaatccaatacttccccacgcaaacatgggaatcaatgcaataagtaaaccttccaattctttctccttacaatggaatattaagtattacctattttcaatcctagagaatctattgactaactttattagcaagatcagcaaatactatagctttatcaacactatctttttccaaagctataatgacttgttttatcaataaattgaccagtgatttagaataaggtaactgttctttagtcatattactaatcttatttaaaataacatcttcaggtaaaatatcttgaaaatagcagatgactttgaaataaaaatcattgtactgtgtcacaccattcagataagtaactaccaggttaatctcatcttgaggcagcctcatatttaaccctaaatttgaaataaaaagtttagccaatattttgagaacattgctttctattctatcacaggattgttgtttttggaaactgaaaattctcatgatatcttcattatctcgataagattccagtaaagttaattgctctaaatcagtattagaagttccagccttaacttttgaatctagaatggatacttcattgatagttaccccaacctccaacgtttgtaaagctttaataaatttatcaatacctatttgtgtctcaccattttcaaaacgtgatagagttgattttgataattgagcacttttggctagagaacttagggatatacctttgtcctctctcaactcttttaaaatttttccataatttttcatacaaaaactttactatatttgtttcttttatgcaacaaaaagcatcctcataggggatgctttttgcccttattttagtgtactgaataatttggtgcctcatttgtaatttgaacatcatggggatggctttctttcaagccagctcctgacatttcaacaaattgagcattatcatgaagttcttttatgttcgctgcacctacatatcccataccagagcgaatgccaccaagcatttggaaaacaatatcggctactgaacctttgtatgctacacgaccttcaataccttctggaaccaatttgttagcctcgtttacagaaccttggaaataacgatcgcttgaaccttttttcattgctgcaattgagcccataccacggtatgtcttgaacttacgcccttggaaaatttctgtttctcctggcgcttcatctgttcctgcaaacattgaacctagcataactgcatttccacctgctgcaagtgcttttacaatatcacctgaatatttaataccaccatcagcaatgatagtcttaccgtactcacgcgcaacagccgctgcatcgtaaatagctgtaatctgaggaacacctaccccagcaacgacacgagtcgtacaaattgaacctggaccaataccaactttaacgacatccacacctgcatcataaagtgcacgcgctccttctgctgtagcaatatttcccgcaatcaatgtgcgattagggaagtgagcacgaatttcagcaattttacggagcacaccagctgaatgtccatgtgctgtatcaatgacaatagcatctgcacctgcttcaaacaaagcttctgcacgttcaaaagtatcagaggttacacctactgcacctgcaactaagagacgtccaaattcatcttttgctgccttaggaaattcaataactttttcgatatccttaatagtaataagtcctgaaagacgtccctcatcatctactaaaggtagcttttcaatacgatgctcatgaagaatacgctctgcagtttcaagatctgtaccaataggagctgttacaagattttgacttgtcatgtgctctgagattagttgtttataatcagaaatgaaacgcatatcacggttagtaataattccaactaatttacgattctcgagtgtctctacaataggaactccactaatgcgatagttttgcatcaattcctcagcttcagagacagtattatctggtgtcaagaagaatgggtcaataataacaccattttctgagcgtttaactttacgaacttcttctgcttgatcaactattgacatatttttatgaatgataccaagcccaccagcacgtgcaatagcaatagccatcttactatctgtaactgtatccattgcagctgtaatgattggaatgtttaatgtcaaattatcagccaactttgtcttcatatcaacttcatttggtaaaacatggctttcagcaggaataagcagaacatcatcaaaagtaaaaccttttttcaaaaacttagtatcccaatttgacatcaaaaaatcctcttttcttagatagtagatataaaaaatcccattaaaattatattgttactatcatatcacgctaaaatcatttgtcaatataaaaagagcatagaattaatagcttctagctctttaaagtaatgaaaaaatcttcttaattttctatttttttgagaagaagaaaggcggcgtatactgacttaatttctcaaaacacttttgagcttcttcactattattacaaataatcaaacaagtatcatcaccacagacagttgctaagatctcaggtaataaaatcgaatctaatatggagccaaaagattgagctaagccaggtagtgtcttcaaaacgatttggttttgaactggaaacagcatgactagggcatcttccatgtaaaaacgtaaccgttcttcccaacgcttctgagatatactatgaatctcataataagtttctgtagcattatcactgctttcgttaaccttaattaaattaagttccttcatatctcgagataatgttgcttgcgtcactgaaacgccatttttttctagtaattcccttaactcatgttgtgtacgcaccttagtctcagagactaaggaacgaattaattggtgtcttgtttcttttttattcatataaactccttattcaatgaatttcttgaaataatttttattattatagagaagcttctttcctttcatttcaacgatatctttttggcgtaattcctttaaaacatgactaactgtctcgcgagtagttccgctcatattggcaatttcaatcgttgtaataggaaaaggtaaatgtcccctttctgtaggaacttgcaaaagtagagttgcaagcgattggataactctcatactggcacttgaagtcaccatattacgaagtcgtatttcatgaactcgtaatagcttagaatatttccgacaaagatgcttcatttgattgatattttgaagagagtattcttcgtataaagccattggcagagaaaaatactcaatatccgtaatagccactgctgaaaaatggtaatcatcatccaaaaagagacctccataaggaaaaaccgtaccttgtctaacataatctgtataaatgaaagaaccagaagcgtctgattgttcaatttttacatgtcctgactggattaaaaacagtttttcacggtaatcaccttcaaaaaataaggtatgattttttagagctgtacgatgtttaatgtggctcacaatatggtcaaattgttcaatagtaaagtgtttaaaatcatctagttgtctgaaataaaaatattgttcttttgtaatcacctgattttctagacctttctaatcattagatgcgaacattttttgtataatgaaaattttttaatgtataaaattttcttgtcacgataaatcctccttcattatagcaaaaaaattcgtagaaagaacgtttttcgttgaattttgaaaacgcttttgagaaaatgtaattgttctgatatcttttaaaaaaattgagaggccttcatgactaaatttattgttgattcatcgtactggaatttgtttccaacttctaaaattggagtaatcttaatcaaagattatcacatggacagaaaccttgaaacagaacttaaacagttactgtctgatagtcattctttagcaaaaaaatatttgcaagagaaagaattcagtcaaaacagagttatccaaacttatcgcaaagcatatcaaacctttaaaactaaaaaaggtgcacgttcaagtatcgaagcattattgaagcgagttaattcaggaaacgaaattactagtataaatcctctagttgatatctataatgccgctagccttaggtttggattacctattggtgctgaggatagtgatacatttagaggtgatttaaaactaactattaccaatggtggtgatgaattttacttgattggcgaagattttaacagaccaactctttcaggtgagcttgcctatgttgatgatgttggagcagtttgccgctgttttaattggcgtgatggaaaacgtactatgattaccgataatactcagaatgcttttttagttatcgaattaattgataatggaagagaaattatttttaaagaagcgttggactttatcgccaccaatacaaatcgttttctaaaagctaaaacacagaccatcatattagataaagaacacagtgaaataacgctataacattaaaacgaaaagtaaaaattttacttttcgttatttttttaggttaataatttctcactttccaacgataaaagaaagaaattgtatagaaatcgctttcatttctataaatttaaatttttttggatataatcgtgacattcttaacacttttaatgcgaataacttccctattttatattcaaaagaaagtagaatgtaaatgtagatatagagataaatcctgtttcaatacaaatctctaactaagaaaggagtaaaatatgactcaaacacatccaattcatgttttctcagaaattggaaaacttaaaaaagttatgctacaccgtccaggtaaagaaatagaaaatctgatgcctgattatttagagagactcttgtttgatgatatcccatttttggaagatgcacaaaaagaacacgatgcgtttgcacaagcacttcgcaacgaaggagtcgaagtactttaccttgaaaatcttgctgccgagtcgttaacaaaccaagaaattcgtgaacagtttatcgatgagtacattggcgaagcaaatgttcgcggtcgtgctactaaaaaagctattcgagaattattactcaatatcaaagataataaagaacttatcgaaaaaactatggcaggtatccaaaagtctgagctacctgaaatcccatcttctgaaaaaggtctaactgatcttgtcgaatctaattatccatttgccatagatccgatgccaaatctttactttacacgtgatccatttgcaactattgggaatggagtttcattaaatcatatgttctctgaaacacgtaatcgcgaaactttatacggtaaatatatctttacacatcacccagagtacggtggaaaagtccctatggtctatgaacgtgaagaaacaactcgtattgaaggtggagatgagcttgtcctttctaaagatgtccttgccgttggtatctctcaacgtactgatgctgcctctattgaaaaactcttagtcaatatttttaaacaaaatttaggttttaaaaaggttttagcatttgaatttgcaaataatcgtaaatttatgcaccttgacacagtctttacaatggttgactatgacaagtttacaattcacccagaaattgaaggcgatcttcgcgtttactctgtaacttacgaaaaccaagatcttcatattgaagaagaaaaaggtgatttggcagatcttctagcgaaaaacctaggagttgagaaagtggaattgattcgttgtgggggtgacaacttagtcgctgctggacgtgaacaatggaatgatggttcaaatacattaactatagcaccaggtgtcgttatcgtttacaacagaaatacaatcacaaatgcaatcttagagtccaaaggattgaaattaattaagattaatggaagtgaattagttcgtgggcgtggtggaccacgctgcatgtcaatgccatttgaacgtgaagacctttaaaatttatgaagctattagtcaatcacttgccttaccaaagagctgcaagcctatatattcgcttttctgttttcgttatcgaaagaaatataaaaatggaagaagaattcgatgataatgacgagcaagatactatttatgctgttctttatgatgggaaacagccagtttcaacaggacgctttcttcctgaaactcaaacagaagctcgtttgactcgaattgcgactttaaaaggttatcgtggtaacggctatggtaccaaaattattatagcactagaaaattatgcaaaagaaaatggttatcactatctaactatacatgctgaattgacagcaaaagatttctaccagacacttgggtatcaagctactgggaatatttatatggaagacggggaagcctgtcaaacactcgaaaaatatttaatttaaaggagacattaacatatgacacaagtatttcaaggacgtagtttcttagcagaaaaagatttttctcgtgaggaatttgaatatcttattgatttttcagctcatttaaaagaccttaaaaaacgtggtgttcctcatcattatcttgaaggtaaaaatattgctctcttatttgaaaaaacatctactcgtactcgcgcagcctttacaactgcagcaattgacctaggcgctcatccggaataccttggtgcaaatgatattcaacttggtaaaaaagaatcaacagaagatactgctaaggttttaggacgtatgtttgatggtattgaattccgtggttttagccaaagaatggttgaagagcttgctgaattttctggagtacctgtctggaatggtttaacagatgaatggcatccaacacaaatgctagctgactaccttactatcaaagaaaacttcggtaaacttgaaggtattactcttgtttactgtggtgacggacgtaacaatgttgccaactcgcttttagtggctgggactttgatgggggtcaatgtacacatcttttctccaaaagaacttttccctgctgaagagattgttaaattggctgaagaatatgccaaagagtccggggctcacgttctcgttactgataatgtagacgaagctgtaaagggagcagatgtcttttacactgatgtctgggtatcgatgggagaagaagataagttcaaagaacgcgttgaacttcttcaaccatatcaagtaaacatggaactgattaaaaaagctaataatgataatcttatcttcttacactgcttacctgcattccatgatacaaataccgtttacggcaaagacgtcgctgaaaaatttggcgtcaaggaaatggaagttactgatgaagtcttccgtagcaaatatgctcgtcatttcgaccaagctgaaaatcgtatgcacactattaaagctgtaatggctgcaacccttggaaatcttttcattccaaaagtttaaattaaacgactatagggagttgacatatagtcaattccctattttaggaaatgaggtataaaatggaaaaagaaaaaaaattaggtcttttaccactaacaatgcttgtcattggctctcttatcggtggcggaatctttgatttaatgcaaaatatgagttccagagccggtttggtaccaatgcttattgcttgggtaattactgctatcgggatggggactttcgttttaagttttcaaaatttatctgaaaaaaggccggacctaacagctggaatctttagttacgctaaagaggggtttggaaactttatgggatttaactctgcatggggttattggttatcagcttggcttggaaatgttgcctacgctgcactcttattcagttcactcggttatttctttaaattctttggtaatggaaataatatcatctcaattattggagcaagtatagttatttgggttgtccatttcttaattttaagaggtgttaatacagctgcatttattaataccatagttacctttgcaaaattagtacctgttattattttcttaatttcagcgttattagctttcaaatttaacatttttagtcttgatatctggggaaatggattacatcaatcaattttcaaccaagtcaattcaactatgaaaaccgctgtttgggtatttattggtattgagggcgccgttgtcttctcaggtcgtgctaaaaaacactctgatattggtaaagcaagtatcctagcattattcactatgatttcactttatgtattgatttctgttttatcacttggtatcatgtcacgtccagaacttgcaaacttaaaaacaccagctatggcttacgttctagaaaaggctgttggtcactggggcgctatcttagttaaccttggtgttatcatttcagtatttggcgctattcttgcttggactttatttgcagcagaattaccatatcaagctgctaaagaaggtgcttttcctaaattctttgcaaaagaaaataaaaacaaagctccaatcaattcactcttagtcactaatctttgtgtacaagcattcttaatcacgttcttattcacacaaagtgcttatcgttttggtttcgcattagcatcatctgctatcttaattccttatgcttttacagcactatatcaattacaattcacactccgtgaggataagtcaactccaggacatcaaaagaatttaattatcggtatcctcgctacaatctatgctgtttaccttatctacgctggtggttttgattacttacttttgacaatgattgcttacactctaggtatgattctctatattaaaatgagaaaagatgacaagcttcctatctttgtgggatatgaaaaaattagtgccattgtcattctagcgctttgcttattatgtattattgaaattatgactggacaaattgacattgctgcaatcctagcaggttagtcattagaaagagggataaattggtaaaagaacatcaaaaaatcgtagttgccttaggtggcaacgctattctatcaacagatgcttcagcaaaagcacaacaagaagcattaatcaacacatcaaaatcactggtcaaactgattaaagaaggccatgatgtcattgttactcatggaaatggtccccaagttggtaacttattgctacagcaagcagcttcagattctgaaaagaatccagcaatgcctttggatacttgtgttgccatgacagaaggaagtattggtttttggttacaaaatgctcttaacaatgaattacaagaacaaggcattgacaaagaggttgcaacagtggtaactcaagttattgtagatgaaaaagatcaagctttcactaatccaacaaaacctattggcccattcttatctgaagaagatgccaagaaacaagcccaagaaacaggttcaaaatttaaagaagatgctggccgtggatggcgtaaagtcgttccttcaccaaaaccggttggtatcaaagaagcttctgttattagacggttagtggactctggtgtggttgttattagcgcaggtggcggaggtgtaccagttattgaagatgctaatacaaaggcattaaaaggggttgaagctgttattgacaaagactttgccagtcaaactttatcagaacttgttgatgctgacttattcatcgtcttaactggcgttgacaacgtttttgttaattttaataaacctaatcaagaaaaattagaagaagttactgtttcacaaatgaaacaatatatcactgaaaatcaatttgcccctggaagtatgctaccaaaggtcgaagctgcgattgcttttgttgaaaataaacctgaatcacgagctattattacttcacttgaaaatattgataatgttttagcccaaaatgcagggacacaaattgttgcaaattaaacaatgtagattaccattacatacactccttattaatgtcactccttaggcattcctataataaaagagagctagatatatctagctctcttttattataggacatatattatttaaaatagttcaaacccatggctgatttaacctcatccaaagtagaggctgcaacagcttgagctttctcactacctttttgtaacatttgataaacttgtcccatatctttagcatattcgaggcgacgttctctaataggtgataattcacgctctaagatatcaagtagataacgttttgttttaacatccccaagtccacctttttgatagtgttctttcatagcagtaatctctttttggtcttcatctcttccaaaaacatcaaggtaatgaaataccatattaccttcgatttgtcctggttcttctactttaatgtggtttggatcagtatacatactcataacttttttcttaactgtatccatatcatctgctaaaaagattccattatttaatgacttagacatttttgcattaccatctaaccctggcagacgacctgctgcatcattttctggatagattccctctggttcaactaaaacctgacaattataagcatgattgaaagatctaactatttcacgtgtttgttcaatcattggtttttggtcagtccctacaggaacaaggttagctttaaaagcggttatatcagctgcttgtgcaacaggataaactaagaatcctgctggaatagactcaccaaaacctttttgagcaatttctgtttttacagttggattacgttctaaacgtgcaagtgaaaccaagttcatataatacatacttaattctgctaactcaggaatttgactttgaatgaataaagtcgacttgtttggatctaacccaacagctaaataatcaagtgcaacattaccaattgattcaacaatagtttgcggatctttagcatggtctgtcagtgcttgttggtctgctaaaaagacaaataaagtatagctaccctcattttgaagtagaactctattttttaagctacctacataatgtccaatatgcaactttcctgtcggtctatcacctgttaagataattggttttgtcatgtttactccttaatataccaaagatatcatttcatatagttatcttatcatgtcacaagccctattgcaattcatccctacaagaaacattcaccttattaagatgattaaacattatgtaacgttaaatcgttcttaataatttcaatcgtataatgaatcataataattaaaagcgttatcgtcacacctaaaatagctctatatgcaaaaatatcgtaaactattgcagctaccaatgctccaataataaatgctagaactaccagtgaataattgatagctcgtcttttttgcatagccgttctctgacgattaacaatatactcataccaaaattgtagcattttccgataattaccagaagtcattaagatagtatatggttccgattcaatgcgacttcctgaaaatgtcaacattaaaatacctgtgctaaaggctaataaagctacccagatattgtggtttacattttcaacaaaaggaataaacatcgtagaaagtaaaaggggacataatgcatatagacgccaaaaagctgttactgcacgttctttaatcacaataccaaccaaaaaaccaattgaaaaaaagaaaatagaaaataatttagtgataaaaaagtgaaaatcattttgtccgagatttgccaccatcaagataatattacctgtctgtgttgcaacaagggagtgaaactgcatgtgactataaacgtcaataaaaccaccaataaaacccaataatacagccatttttcttccatcttgtggcattataatatcatctctgcgcattatagcaaattctccttcttgtattatcatgttttctattatataccaataaaataggcattcaactcaaaaatatcgagaaatttcttttctaaatttacttgactaccaagtctcgctgttagataataggtaataataagttttgataaaataaaaatgttatgactgagttgtcaatattatttattgacagctttctctttttatcatgttattattactaaagttaaggagcttatcatgtctaaaaaaattaagaattttatactattaaatattggatctctaattgttgcatttggtttcaacgctttctttcttcataatcatattgtcacgggggggattagtggtttggcagttagttttcatgaagtatttggttgggattctgctttttttattatgattatcaatattccattgctccttctttgctactttggcttaggtaaacaaacctttttaaaaactgtctatggttcttggatttttcctgtttttattaagttaacacaaagtgtaccaactttgacccacaacccactcctcgcagcactttttggaggtgttattgtaggatgtggtttggggattgttttttggagcgactcttcaactggtggaacggggattatcattcaattcttaggaaaatatactcctataagccttggacaaggggttatattgattgatggacttgttacaattgttggtttcctagcttttgacagtgatacggttatgttttctattattgggttgataactattagttatattattaatgctatccaaactggatttacaaccttaagcactgtcttaatcgtttctcaagagcaccaaaaaattaagacatatatcaatactgtcgcagatagaggagtaacagaaattcccgttaaagggggatattctggaactaatcaaatcatgcttatgacaactattgctggttatgagtttgctaaattacaagaggcaatagcagaaattgacgaaacagccttcataacagtaactccaacatcacaagcttctggacgtggatttagtcttcaaaaaaatcatggacgtcttgatgaagacattcttatgccaatgtaatcgattgataattaaagctttttctagtagaatagcagatagaatatacacaagaggtaacaaaattgcttacagtttcagatgtttcactacgttttagtgatcgcaaattatttgatgaagttaacattaactttacagcaggaaatacctatggtcttatcggagcaaatggcgctggtaaatcaactttccttaaaattttagctggtgatattgaaccaacaacaggacatattgcacttggcccagatgaacgcctttctgtacttcgccaaaatcattttgattatgaagatgagcgcgtcattgatgtcgttatcatgggtaatgaaacactttatagtatcatgaaagaaaaggatgctatctacatgaaagaagatttttctgatgaagatggtgttcgcgctgcggaattagaaggagaatttgctgaactcggtggatgggaggctgaaagtgaggcttctcaattactccaaaatctaaatatttcagaagagcttcattatcaaaatatgagtgaactagctaatggagacaaagttaaagttctccttgcaaaagctctctttggtaaaccagatgtacttctccttgacgagcctaccaatggacttgatatccagtctattacttggttagaagatttcttgattgactttgaaaatacagttattgtagtttcccacgaccgtcatttcttgaataaagtatgtacacatatggctgaccttgattttggaaaaattaaactgttcgtcggtaactatgatttctggaaagaatcatcagaattagcagctcgtttacaagctgatcgtaatgctaaagcagaagaaaaaattaaacaacttcaagaattcgttgcacgattttcagcgaatgcttcaaaatcaaaacaagcaacttctcgtaaaaaaatgcttgataaaattgaacttgaagagattgtaccatcaagccgtaaatacccattcgttaactttaaagccgaacgcgaaatgggaaatgatttattgaccgttgaaaatctctctgtcactattgatggggaaaaaatccttgataatatcagtttcattcttcgtcctggtgataaaactgcacttattggacaaaatgatatccaaactactgcacttattcgagcattgatgggggatatcgaatatgaaggaacaatcaaatggggagtaacaactagtcgttcttaccttccaaaagacaattcacgagattttgcttctggcgagtcaatcttagaatggcttcgtcaatttgctagtaaagaagaagacgataataccttcttacgtggtttcctaggtcgtatgcttttctctggagatgaggttaacaaatctgttaatgtcttatctgggggtgaaaaagtacgcgttatgctttcgaaattaatgctattaaaatctaatgttcttgttcttgatgatccaacaaaccacttagatttggaatctatttcaagtctcaacgatggactaaaagatttcaaagaatctattatttttgcaagtcatgaccacgagtttattcaaactttagcgaaccatattattgttctttctaaaaacggagttatcgatcgtatcgatgaaacttacgatgaatttcttgaaaataccgaagtacaagctaaggtcgctcaactctggaaataatcctttggcatatctctaacctaataaacgtgtcaagattgaaaatcttaaaactatattaatcatttaaataaaaaggttggaacaaatagtgtccagcctttttatcttaggagatatatatgacaattaaccactataagcttcgtataccttactatacaataagctttctacttcccttcataatcatagtctgtatcctctttactaagaatatttattggggaagtccaacaaccatattagcaagcgatggctttcatcaatatgttatctttaatcaagcattaagaaatattcttcatggttcaaacagcttattctatacctttacaagcggtttaggtttaaatttttatgctctgagtagttactatttgggaagttttttatccccaatagtttatttctttaacctaaaaaatatgcctgatgctatctaccttttaacaatatgtaaaatagggttgataggtttgtcaatgtttgtcactctttgtaaacgtcattgtaaagttaatcgtgtcttacttttagtaatttctacttgctatagcttaatgagtttctcaattagccaaattgaaattaatatgtggctagatgtatttattctaattccccttgttgttttaggagttgatcagctactatgggaaagaaaacctatactttatttcctctctctgacagccttattcatccaaaactattattttggttttatgactgccatctttactagcctttacttcatcgtacaaataacccgtaatactgatagtaaggttgcatttaaacaatttcttcattttacctttttatctcttttagctggtatgactagtagcattatgattttgccaacttattttgatttaactactcatggtgaaaagttgacaaaggtatcgaagatgtttacagaaaattcttggtacatggatttgtttgctaaaaatatgattggagcctatgatacaacaaaatttggctctattcctatgatttatgtaggtttacttcctttactcctttctttactttactttacaataaaggaagttcctcgaaggactagattagcatatggatttttaataatatttgttattgctagtttttatataacacctctagatttattttggcaagggatgcatgctccaaatatgtttctccatcgctactcttgggtactttcagtacttatctgtctgctagctgctgaatgccttgagtatttagacaacatttcttggaaaaagattttaggggtcaatttaattttagtaagtggtttcataatcacgtttttatttaaaaagcattatcattaccttaatcttgaattacttcttttaaccttaactttcctctcagcttatattattctaactattagttttgtcagtaagcaaatccctaaattagttttttatccctttcttattggttttgttgtattagagatgacattaaacaccttttaccaactaaatagtcttaacgatgaatggatatttccatctaggcaaggatatgctaaatataatcacagcattagcaaacttgtcagaaagactgagagaaataactctacattcttccgtacagagcgctggttaggacaaaccggcaacgactctatgaaatataattataatggtatttcacaattttcatctattagaaatcgttcttcaagtcaagtgcttgatagacttggctttaaatcagatggtacaaatttaaatttacgttatcaaaataatactttgatcgcagatagtctatttggtgtgaagtataaccttacagaatatccttttgataaatttggttttatcaaaaaagctcaagataaacaaaccattctttacaaaaatcagtttgccagtcaattagctatactaacgaatcaagtatatcaagataaaccatttactgtgaatactttggataatcagacaactcttttaaatcaattaagtggtttgaaagagacgtattttgagcatcttattccaaatagcgtttctgggcaaaccactcttaataaacaagtatttgttaaaaagaataaacaagggaatactgaaattacctataacataactatccctaaaaacagtcagttatatgttagtatgccgtttataaattttaataatgaggaaaataaaattgttcaaatctccgttaataatggaccatttgtacctaatactcttgataatgcttattcattttttaatattggttcctttgctgaaaacagtcgtatcaaagtaaaatttcaatttccacacaatgatcaagtttctttcccaattcctcacttttatgggctcaagttagaagcttatcaaaaagctatgactgttattaataaacgaaaagtaaaagtaagaactgatcacaataaagttattgctaattatacaagtcctaatagaagttctcttttcttcactattccctatgataggggttggaaagcttatcaaaataataaagaaataaaaattttcaaagctcagaaaggttttatgaaaataaatattcctaaaggaaaaggcaaagtaacattaatttttatcccttacggctttaaatttggggtaggcctatctattactggaatagtattatttactgtctattattttaaatttggaaaaaataaaataggatgagagtattctcatcctattttattaacaaaaaaacgccgacaaatcaacgtttagatgtgtcttatcactccggcagcaggactcgaacctgcgacatcatgattaacagtcatgcgctactaccaactgagctatgccggataaataaaaaactgcaaagcagttatcaatagtccgtacgggattcgaacccgtgttaccgccgtgaaaaggcggtgtcttaaccccttgaccaacggaccataggttaggtgtttccttagtactcttaatattatatcagaaaaaaaaggtttgtctatacttttgttcaataatttttacaaaaaaattgaacctacttatgagcaaaaaaatatatttccaactcataaatagtacatatgaaaacttgacagcctgcctaatattttggtagaataacagagttgatggttccatagctcagctggatagagcattcgccttctaagcgaacggtcgcaggttcgaatcctgctggaatcagatattgaaagcctagatagattatctaggctttttatttgtttttagcagttgtttcataaatggaacgattatttgtggtaaggagtgccttgacgaatcataaaagcacgataaatttgttccatcaagactaatttcataagttgatgaggtaaggttaacagtccaaaactcattaaataatcagcacgttttttcactttttgagataaacccaaactaccaccaataacaaaagtaatagtagagtagccggatatcattttttgatcgattagatggctaaatgattcagatggcaattgtttcccttctatagctaaaccaatgacataatccctctcacctattttactcaaaatacgttccccttctatatctaaaattctttgattttcagatatactagctttatcaggtgtcttttcatcagctagctcaattgtctcaattttagaaaagcgattcagacgtttctgatactctgcaacaccttctttaaggtatttctctttcaattttccaactgtaattatttttaatttcatagctacattataacataatccacaatattttcacaatttatccacatgtttatccttacatatccccttattttataggtattctataactataatcaaggttatccacaagttgtggatatttcctttttttagcttttaaggtataattaagaagcttgtcataagattagtataaaaatttacggaggtagctatttgtgaaaaaaaaattagtctcatcacttctaaagtgttctctaatcattattgttagctttgctggtggagcatttgctagttttgtcatgaatcataatgacaatattccaaatggtggtgtcactaaaactagtaaagtaaattataataacataacgcctacaacaaaagctgttaaaaaggtacaaaatagtgttgtttctgttatcaattataaacaacaagagagtcgttctgacctatcagacttctatagtcatttttttggtaatcaggggggcaacactgataagggcttacaagtttacggtgaaggctctggagtcatctataaaaaagatggtaaaaatgcctatgttgtcactaataaccacgtcattgatggggctaaacaaattgaaattcaactagctgatggctcaaaagcagttgggaaacttgttgggtcagatacctactctgatttagccgtcgtcaaaattccatcagataaggtttcaaatattgcagaatttgctgattcatcaaaactcaacattggtgaaactgctatagcgatcggaagccctcttggaactgagtatgcaaattctgtaactcaaggtattgtatctagtttaaaaagaactgtaacaatgactaatgaagaaggacaaacagtttctacaaatgctatccagactgatgctgctatcaatcctggtaattcaggtggagcacttatcaatattgaaggacaggttattggaattaattctagtaaaatttcttctacatcaaatcaaacctcaggacaatcgtcaggaaatagcgttgaaggtatgggatttgccattccttcaaatgatgttgttaagattatcaatcaacttgagagtaacggacaagtagagagacctgctctaggtatttctatggctggattaagtaatttaccatccgatgttattagtaaactgaaaatcccaagtaatgttactaatggtattgtagtagcatctatccaatctggcatgccagctcaaggcaaactaaagaaatacgatgtcattactaaagttgacgataaagaagtagtatctccaagtgatttacaaagtttactctatggccaccaggtaggggattccataacagtaaccttttatcgtggtgaaaataaacaaacagtcactataaaacttactaaaactagtaaagatttagctaaacaacgagcaaataactaaatcaattctagttattttaactaagatatagtaaaattaaaggggttggtcagatagaccaatccctttagtaagtctatagaatctgaggtctaaaatggaatatttagaaacgatcaacatcaatcatattgctccaaatccgtatcaacctcgcctagaatttaatacaaaagaactagaagaattagccaactctattaaaattaatggccttatccaacccattattgtaagaccgtcagcagtctttggttacgaactggtagccggagaacgacggctaagagccgcaaagttagctaaattggaaagtatacctgcaattataaaatcctataataatgatgatagtatgcaattagctattgtcgaaaatttacaacgatctaatttgtcacctattgaagaggctaaagcctactctcaacttctacaaaagaaaagtatgacacatgaagagttagcaaaatatatgggaaaatctcgtccctatatatcaaatacgatacgactactaaatttaccgccactaattacttcagctattgaagaaggaaaactttcctctggtcatgcgcgtgcactactcagtctaccagatgctagtcaacagaaagattggtatcagagaatcctcactgaagatattagtgtaagacgactagagaagttattaaaacaagaaaagaaaacaaatcataagtcacttcaaaataaagatgtctttctaaaacatcaagaaaatgagttagctcaatttctaggtagcaaagtgaaacttactattaataaagatggtgctggcaatataaagattgctttcgctaaccaagaagaattaaacagaattatcaacactctaaaataagggtgttgattatttttttatttaatcaaacttatccacaaggtattttgctatttttctgttgattctctaatttccacagtctgtggaaaactttaattaacattgttgattttattcttcaacatctgtggaaaactttatttttttatggtacaatataacaataattatccacaagacaataaggaagaagctatgacggaaaacgaacaactattttggaatagagtactagagctatctcgttctcaaatagcaccagcagcttatgaattttttgttctagaggctagactcctcaaaattgaacatcaaactgcagttattactttagataacattgaaatgaaaaagctattctgggaacaaaatttggggcctgttatcctaacagctggttttgaaattttcaatgctgaaattacagctaactatgtctcaaacgatttacatttacaagaaactagtttttctaactaccagcaatctagcaatgaagtaaatactttaccaattagaaaaatcgactctaaccttaaagagaaatatacttttgctaattttgttcaaggagatgaaaatagatgggctgtttcagcatcaattgctgtagctgatagtcctggcacgacttataatcctctatttatctgggggggacctggtctaggaaagacgcatctactaaatgctattggaaatcaagtcttaagagataatccaaacgcgagggttttatacatcactgctgagaattttattaatgaatttgtcagtcatattcgtttagattcgatggaagaattaaaagaaaagtttcgcaacttagacttactcctgattgatgatattcagtcgcttgctaagaaaaccttaggggggacccaagaggagttcttcaatactttcaatgctttacatacaaacgataaacaaatcgtattgaccagtgaccgaaatccaaatcaattaaatgatctagaagaacgtctagtcacgcgctttagttggggactcccagtaaatatcacaccacctgattttgaaacacgagttgctattttaaccaataaaattcaagaatatccttatgattttcctcaagataccattgaatacttagcaggagaatttgattccaacgtacgtgaattagaaggagccttgaaaaatattagtctagttgctgactttaagcatgctaaaactattacagtagatatagctgcagaagctatcagagcacgtaaaaatgatggtcctattgttactgtcattcctatagaagaaattcaaatacaagttggtaaattctatggcgtaactgtaaaagagataaaagcaactaaaagaacacaagatattgtccttgcaagacaggtagccatgtacttagctcgtgagatgacagataacagtctcccaaaaataggtaaagaatttgggggacgagatcactcaactgttctccacgcttataataaaataaaaaatatggttgctcaagatgacaacttacgaattgagatagaaactatcaaaaataaaatcagataggctttgtggataagtatcagaaaaatacgagacttttccacaggttgtgaacaagttattttccttatgaatattaaagttataatacttattcacaactttaacaggacctactattactactaaatttatactaatatataaaggatatactatgattcatttttcaataaataaaaatttcttcttgcatgctctaacggtaaccaaacgagctattagtcataaaaatgcgattccaatcctttcaactgttaaaatagaagtgactagggatgctatcattttaacggggtcaaatggacaaatttcaattgaaaatactattcctgcttcaaatgaaaatgcaggtttactagtaacgaatccaggctctattttgttagaagctggtttctttattaatattatttcaagtttaccagatgtaactttagaatttacagagattgaacaacatcaaattgttcttactagtggaaaatcagagattactttgaaaggtaaggatgtcgatcaataccctcgtctgcaggaaatgacaacagatactccattaacattagaaactaaactgttaaaatcaattattaatgaaactgcttttgctgctagccaacaagaaagccgtccaatcttaacaggtgttcatttggttatcagtcaaaataaatactttaaggctgttgcgacagattcacaccgtatgagtcaacgcactttccaattagagaaatcggctaataattttgatttggttgttccaagtaaatcccttcgagaattttcggctgtttttacagatgatattgaaactgtagaggttttcttctcagatagtcaaatgttatttagaagtgaaaatatcagcttctatacacgtttgcttgaaggaaactaccctgatactgatcgcctcctaactaatcagtttgaaaccgaaattatctttaatacaaatgctttacgccatgctatggaacgtgcttatttaatttcgaatgcaactcagaacggtactgttcgtttagaaattcaaaatgagacagtctcagctcatgtaaactctccagaagttggtaaagttaatgaggaattggatactgttagtcttaaaggtgatagtttaaatattagctttaatccaacttacctaattgaatctttaaaagcagtaaaaagcgaaacagttacgattcgatttatttctccagtacgtccatttactttgacacctggtgaagatactgaagatttcatccaattaataactcctgttcgtactaactaaataagaaaactacccaagttattcttgggtagttttcttattctaagatatgctataatgatgagtaatatgactctatatataatagctaacccccatgctggtaataaaaatgcctccactattgttggtaaaattcaggagctttatcatactgaagatatttctgtgttctatacagaacagaaagatgatgaaaaaaaacaagtcattaatatactaaggtcttttaaagaaagtgatcatctaatgattataggaggagatggtaccttatcaaaagtaatgacttatctcccccaacatattccgtgcacttattatcctgttggttcgggaaatgattttgccagagctttgaaaattcctaacctcaaagaaacccttaccgctattcagacagaaagattaaaggaaattaattgctttatttatgataaagggctgattttgaatagtttagatttaggttttgcagcctatgtcgtttggaaagcatctaactctaaaataaaaaatattttgaatagatatcgtctaggaaaaataacttacattgttatagctatcaaatcattattacattcttctaaagtacaagtattagtggaaggagagacaggacagcagataaaactaaatgacctttattttttcgcattagcaaataacacttattttggaggtggcattactatttggcctaaagcaagtgctttaactgcagagttagatatggtttacgctaaagggcatacttttctaaaacgattaagtattttattatctttggtttttaaaaggcatactacctctaaaagtataaaacaccagactttcaaagctatgaccgtatattttcctaaaaatagtttgattgaaatagatggcgaaatagttgagttagatcagattagtttaaaatgtcaaaaaaggtatttatatatgtaaggagaaaagatgtatcaagttggatcacttgttgaaatgaaaaaacctcatgcttgtgtaattaaagaaactggtaaaaaggctaatcaatggaaggtactgagagtaggagctgatattaaaattcagtgtactaactgtcagcatgtgattatgatgagtcgttatgattttgagcgaaaattaaaaaaagtactgcaaccatgaaagtccttttaaacaaataattatagctatatttgcaaccaatactttcctaaataatgctagtatgccgttggaaaattagctattctaatgttatcgaaagaagaaaggtggtcattgacaatgacgaaagttgcagaacagttatttatttttcggtaagtcatatcaaaatgggaaaatggggataccacaccagatttggataatttaatcaggttagctgagatttttgacgtgagcttagatgaacatgttttagctaaaacaaatgaagttaaagttgaacgtatttatgaaaataaaccccttgatctacgaaaatacaataaaatttattggtttatttttcgaaatattattcgatctctactaattattttagctatattaactttcttataagctctaggtattccctttgtttcggagtggataatttaaatgaaggtgaaagagtggcataatgataagcaaatctgaaattttcttcttatcataccgctttttcttctattttttgatataatagtcttgattgaaatttgaatggagactcactaaatggctttaacagcaggtattgtaggcttaccaaatgttggtaaatcaactttatttaacgcaattacaaaagcaggagcagaagctgctaattatccttttgcgactattgatcccaatgttggtatggtagaagtaccagatgagcgtctacaaaaattgacagaattgattacgcctaaaaaaacagttccgacaacctttgaatttactgatattgcaggtattgttaaaggtgcttcgaagggggaaggtctaggtaataaatttttagctaatattcgtgaagtggatgctattgttcatgtggtacgtgcgtttgatgatgaaaatgttatgcgtgaacaaggtcgtgaggatgctttcgttgatcctatagcagatattgatactattaatcttgaattaatcttagctgatttagagtcaatcaataaacgttatgcgcgtgttgaaaaaatggcacgaactcaaaaagataaagaatcagtagcagagttcaatgttttacaaaagattaaacctgttttggaagatgggaaatcagctcgtaccattgagtttacagaagaggaagcaaaagttgttaaaggtctttttttattaacaactaaacctgttttatatgttgctaatgttgatgaggacaaagtagctgatcctgatgatatcgactatgttaatcaaattcgtgcatttgcagaaacagagaatgcagaagtagtcgtgatttctgctcgagctgaagaagaaatatctgaacttgatgatgaagataagttagaatttttagaagctattggattaacagaatctggtgttgataaattaacacgagctgcttatcatcttttaggccttggaacttactttactgctggtgaaaaagaggttcgcgcttggacgtttaagcgtggtataaaagctccacaagctgctagtattatccattcagattttgaaagaggttttattcgtgcagtaacgatgtcatatgatgaccttattcaatatggatctgaaaaagcagtaaaagaagctggccggttacgtgaagaaggaaaagagtatattgttcaagatggcgatatcatggaattccgtttcaatgtctagtaataaataatcgatttgttaacttttaggttaaggatattgttaatatccttaaccatttttgcgttttaatggagaagataatggtaaaaatgattgttggattaggaaatccaggaagtaaatataatgatacaaaacataatattggatttatggctgttgacagaattgtaaaagaccttgacgtcaactttacagaagataaaaattttaaagcagagataggtagtgattttatcaacggtgaaaaaatttattttatcaaaccgactacttttatgaataacagtggtattgctgtaaaagccctgcttacttactacaacatttctattaaggatatgattatcatatatgatgatttagacatggaagtcggtaaaatacgttttcgtcaaaaaggatctgctgggggacataatggtatcaagtctattattgctcatttaggtactcaagaatttgatcgtattaaagtaggtataggacgtccgaatggacgtatgacagttattaatcatgttctagggaaatttgataaaaatgatgaaattatgatattaaatacccttgataaggttgacaatgctgtcaattattatttacagacgaatgattttcaaaaaacaatgcagaaatacaacggtttaaaatgaatattatagaattatttagccaaaataaagtggtgcggacatggcactctggattagtaactaatagtcgccaattagttatggggttttcaggagcaagtaaagctattgccatagcatcagcctacgagaagttatctaaaaaaattatggtagtcactgccactcaaaccgattctgataaattatcaagtgatatatcaagtttaattggagaagataacgtttatcaattttttgctgatgacgttcctgcagcagagtttattttctcttcattagataaatcaatttcacgactcagtgccctgaggtttctaaaagatccagaaaaaaacggtgttttgattactagtatcagtggtttaaggttactattaccaaatccggaagttttctcgaaaagtcaatataagtttgaaatcggtcaagaatgttatttagataaattgtgtaagaacctagtcaatttaggttatcagaaagtttctcaagtatttagtcctggtgaatttagccaaagaggagatattttagatatttttgagatgacacaagaatatccttatcgcttggaattcttcggagatgaaatagatggcatcaggcagtttgatattgacactcaaaagtctcttaaacaattagagtcagtacagatttcgccagcagatgatattattttacaagatgcagatttcgagcgtgcaaagaaaaaacttgagggctatctagtaacagctagtgaggtacaacgcacctatttgagcgaggttttatctacaactgagaatcattttaagcactcagatattcgtcgttttctaagtatcttttatgaaaaagaatggggaatattagactatattcctgagggaactccactttttgttgatgattttcaaaaaattgtagatcgaaatgctaagttagatttagaaatagctagccttctgacggaagatttacaacaaggcaagtctcattctagtttgaactatttttcagatccttataagcaattaagacaataccaaccagcaaccttcttttcaaatttccacaaaggattaggaaatctgaaatttgataaacttcatcattttactcaatatggaatgcaagaattttttaatcaatttccattgttggtcgatgaaatcaatcgttataagaaatctggagcgacagtactgttgcaagtagattctcaaaaaggtttaaatctccttcaagaaaatttaaaagaatatgggttagatttaatcatttcagataaaaacgatatcgttcaaaaggagtcacaacttattgttgggcatctttcaaatggtttttattttgcagatgagaaaattgttctgattactgaacgtgagatttatcataggcgtgttaaaaggaaaattagacgcagtaatattagtaatgcagaacgtctaaaagattataatgaactttcagttggcgattatgttgttcataatgttcatggcgtaggaaaatttttaggtattgaaacaattgagatacaaggtattcatcgtgattatctgactattcaatatcaaaatgctgatcgtatctctatccccgtagaacaaattgaacttctaacaaaatatgtctctgcagatggcaaagagcctaaaattaatacgttaaatgatggtcgcttcaaaaaagcaaaacagagagttgcaaagcaagtagaagatattgctgatgatttgttgaaactttatgcagagcgtagtcaattacaaggatttgcattttctcctgacgataatatgcaaaatgactttgataatgattttgcatatgtagagacagaggatcaattgcggtctataaaagaaattaaacaggatatggaaggtaatcgtccgatggatcgattattggttggagacgttggttttggtaagacagaggttgctatgcgtgcggctttcaaagctgtcaatgaccataaacaagttgttgttttagtcccaacaacagttctagcccagcagcattttgaaaattttaaagaacgttttagcaattatcctgttacagttgatgtacttagtcgttttcgtagcaaaaaagaacaaacagatacactaaaaagattatctaagggccaagttgatattattattggaacacatcgacttctctctcaagatgttgtattttcggatttagggttaatagttattgatgaggaacagcgatttggtgtaaagcataaagaaaagttaaaagaattaaaaacaaaagttgatgtattaactttgacagcgaccccaatacctagaacattacatatgtcaatgcttggcattagagacttatcagtcattgaaacacctccaactaatcgttatcctgtgcagacttacgttttggagacaaatcctggtttagttagagaagctattattcgtgagatagacagaggaggacaggttttttatgtttacaataaagttgacactattgatcagaaagtttcagaacttcaggagttagtaccagaagctagtattggttttgttcatggtcaaatgtctgaaattcaattagaaaatacattaatagactttatcaatggagattacgatgttttagttgcaacgacaataattgagacaggagtcgatatttcaaatgttaataccctctttgttgaaaatgcagatcatatgggcttgtcaaccctttatcaattaagaggccgtgtgggtagaagtaatcgcattgcttatgcttaccttatgtacagacctgataaagttttaacagaaatttctgagaaaagactagatgcaatcaaagggtttacagaattgggatctggttttaaaatagcgatgcgtgatttatctatacgtggtgcaggaaatattttaggagcttcacaaagtggttttattgattcggttggattcgagatgtattcacagcttctagagcaagcgattgccaccaaacaagggaaatcattaattcgtcaaaaaggtaatgctgaattagccttacaaattgacgcctatttaccagcagaatatatatcagatgagcgccaaaaaatagaaatatataagcgtattcgtgaattagaaactagggctgattatgaagccttacaagatgagttaatagatcgttttggagaatatcctgatcaagttgcataccttttagaaataggacttttaaaagcttatctggaccttgcctttactgaattagtagaaagaaaaggtaatgaaataagcatcctatttgaaaaagcatctttgaagtattttttaactcaagattattttgaagcactatcaaaaactcaacttaaggctagaattagcgaaacaaatggtaagatggaagttgtttttaatatcaaacataagaaaaattatgaaattattgaagaacttctaaaatttgccgaatgttttatcgagattaagtcacgtaaaccagtagaagaataactaagtgaaaagttgcaaggaaatttggatactcttttagaaaatgtttggttcaagaagaatagtacgagcaacattatgtttcacgtcaaacatctcaacttttgaaagacataaatatttttagaggttattaaaatagaagttttttacttgatatttgagagaattaagagagctattagctctctttttgttacattatattgacaaatattatcagttcagatatttttcaaaaaaaatgctaaaatagtagagttaatttagatagaaggatgtgatcatcagtgagattagacaagtatctaaaagtgtcgcgtatcattaagcgtcgtcccgttgctaaagaagttgcagacaaaggacgtgtcaaggtgaatggcgtattagcaaagtcatcaactgacctaaagcttaatgaccaagttgaaattcgttttggtaataaattgttgaccgttaaagtattagaaatgaaagatagcactaagaaagaagatgctatcaaaatgtatgaaattattaatgaaacaaggatagaaacagatgagcaagcctaatgttgttcagttaaataatcaatatattaacgatgagaatctaaaaaaacgttacgaagctgaggagttacgccgaaaaaatcgtttaatgggttgggttcttatttttgtcatgcttttatttattttacccacttataatttagttaagagttacagaactttacaagaacgtcgtcaagaagttgtaaaattaacgaaagactatcagacattaactaatagaactgagaaccagaagttgctagcaaaacaactaaaaaatccagattacgttcaaaaatatgctcgagctaagtattatttctctaagaccggcgaaatgatttacccattaccagaccttttaccaaaataattatgaataatttaattgaaacaatagaacattttctagcctactcggatgacaaactagaagaattagctgataagaactatcaacttaggcaaacaattgtagaaaaagaaaagattgagagcagagaaaagtaatgaagaaagttttaaccttcttattatgtagcttatattttgtatcaatcccagctataagtaccgaggagccattaacgctttctcaaaatagacgatacgccttaactcagacagttgtggataaggaaatgtattttgatgctattccagagagaccaactacaaaaattgaaataagcagttttcaagatgaagctttaaccataacaggagagactttagttccaaatactttattgtcgattgtttctcttacaattaattcaaatggaattccagtatttactttgtccaatggacagttcataaaggctagtcgtgaagctatttttaatgatttagtttctaagcagcaatctgtctcattggattattggttaaaaccttcttttgtgacttatgaagcaccttacacaaatggtgttagtgaagttaaaaataatttaaaaccttattccagagtgcatttagtagaacaagcagaaacagaacatggtatttattataaaacggacagtggtttttggatatcagtagaagatctatcggttgctgataatcgtatggctaaggttcaagaagtattattggaaaaatataataaagataaatatggtatatacatcaaacaattaaatacacagacagtagctggtattaatattgataggtcaatgtactctgcaagtattgcaaaattagcaacactttatgctagccaagagcaagtaaaattaggaaaactgtcattggacagcaaatttgaatacaaagataatgttaatcaatttcctaatagctatgatccaagtggtagtgggaaattagagaaaaaagctgatcataaattatataccgttaaggagttacttgaagcaactgccaaggaatcagataatgttgcaacaaatatgctaggttattatgtcaataatcaatatgattcaatgtttcaaacacaagtagacacaatttctggtatgcactgggatatgaaaaaacgccagatttctccacaagctgcgggtaaaatgatggaagcaatttattatcaaaatggagatattgttaattacctatcaaagactgattttgataatacaagaatccctaaaaatataccagttaaagtagcacataaaattggagatgcttatgactacaaacatgatgcggctattgtttatgcagaacaaccttttattatgattatctttacggataaatcatcttacgatgatatcactaagattgctgacgacgtttaccaggttttaaaataatatgtataacactattttgaaagataccttatccaaagggttatttaccgctcatcagaaagttctaattgctgtttctggtggcattgattcaataaatttgttgcaatttttataccagtatcaaaaagagttatcgattagtattggtattgcacacataaatcatggacagcgaaaagaatcagaaaaagaagaagaatatatcagacagtggggacagatacatgatgtccctgtctttatctcttattttcaaggaatattttcagaagatagagcacgtaaccatcgctacaattttttttcaaaagttatgcgtgaagaaggttacacggctttagtaacagctcaccatgctgatgatcaagctgaaactgtatttatgagaattttaagaggaagcaggctacgctatttatcagggattaagcaagtgagtgcttttgcaaacggtcaattgattagaccatttcttccatataaaaaggagttattaccaaatatttttcattttgaagatgctagcaacgcttcgtctgattatttaagaaatcgaataagaaacgtctactttcctgctttggaaagagaaaataatcaattgaaagattctctcataactctctctgaggaaacagagtgtttattcacggctttaacagacctaacaaggagcatcgaagtaacaaactgctatgattttttaaggcaaactcattctgtccaagaatttttattgcaagattacattagcaaatttccagatttacaagtgagtaaagaacagttcagagtaatattaaaattgattagaactaaagccaatattgactatactattaaatcgggctattttcttcataaggattacgagagttttcatattacaaaaatccatcctaagacggatagttttaaggttgaaaaaagattagaattgcataatatacaaatattctcacaatatttattttcctatggaaaattcatttctcaagcagacattactattcctatttatgatacttctccgattattttaagaagaagaaaagaaggggataggatatttttaggaaatcacactaaaaaaattcgccgtctatttattgatgagaaaataactctaaaagagagagaagaagctgttattggggagcaaaataaagagttgatatttgtgattgttgcaggtagaacatatttgagaaaaccttctgaacatgatataatgaagggcaaactttatattgaaaatttagaaaaaaggtgacatcatgcttgaaaatgatataaaaaaagttttatattcagaagaagatattattctgaaaacgaaagaattaggagctaaattaactgcagattatgcaggtaagaatccattattagtaggtgtattaaaggggtcagtgccttttatggctgagctattaaagcatattgatacacatgttgaaattgattttatggttgtttcaagctatcatggtggtacaactagtagtggagaagttaaaattttaaaagatgttgatactaacattgaaggaagagatgtaatctttattgaagacatcattgatactggacgtacattaaaataccttcgagatatgtttaagtatcgccaagctaactctgtcaaagttgcaaccctttttgataagccagaagggcgattggtagatattgatgctgattacgtttgttacgatatcccaaatgaatttattgtgggattcggtttagactatgctgaaaactatcgtaacttaccttatgttggtgtgttaaaagaagaaatttactcaaaatagaaaaaaggtactctcttaaactatgaaaaataataaaaataatggttttctgaaaaattcctttatttacatattattgattattgcggttattacaacctttcaatactatttaaaaggaactagctctcaaaaccagcaaatttcttatacaaaacttgttaaacaattaaaagctggagaaattaagtctatctcataccagccaagtggtggtgttgttgaagttagtgggacatataagaaagccaaaacaattaaatcagctaatagttttacttttttaggtggtagtgttgctactaaagttacaggatttaattctgttatactaccaaatgactcttcaataaaatctcttgttagcgctgctgaagaaaataacactaatattcaggtcaaacatgaaagttcaagtgggacatggatttcttatattgccagttttttacctttagttatcatgattggtttcttcatgatgatgatgaaccaaggcggtggcggtggcgctcgtggtgccatgagctttggtaaaaataaagcaagatcatctagtaaagatgaggttaaagttcgattttcggatgttgctggagcagaggaagaaaagcaagaattaatagaagtcgttgacttccttaaagatcctaaacgatataaatctctaggtgcccgaattccagcaggggttctattagaaggacctccagggacaggtaaaaccctattagcaaaagctgttgccggtgaagcaggggttccattctttagtatttccggttcagattttgttgaaatgtttgtcggtgttggagctagtcgagtacgctctttgtttgaagatgctaaaaaagctgaacgtgctattattttcattgatgaaattgatgctgttggacgtcgacgtggagctggtatgggtggcggaaacgatgaacgtgaacaaacgctcaaccaacttttaattgaaatggatggttttgaaggaaacgaaagtattatcgttatcgctgctaccaaccgtagtgatgtgttagatcccgcattactgcgtccaggacgttttgatagaaaagttctagttggacaacctgatgtaaaaggtcgtgaagcaattctgagagtacatgctaaaaataaaccattagcagataatgttgacttaaaagtagtagctcaacaaaccccaggatttgttggtgctgatttggagaatgttctcaatgaagctgctttagttgctgcgcgacgaaataaaaaagttattgatgcttcagatattgatgaagcagaagaccgtgtaattgctggtccttctaaaaaagatcgtactatttctgaaagagaaagagctatggttgcttaccatgaagctgggcacacaattgtcggtttgattctttcaaatgcgcgagttgttcataaagttactatcgtaccacgtggtcgtgcaggtggatatatgattgctttacctaaagaagatcaaatgcttctttcaaaagatgatatgaaagagcaattagcaggtcttatgggaggacgtgtagcggaagaaattattttcaacgctcagacaacaggtgcctcaaatgacttcgaacaagccactgctatggcccgcgctatggtaactgaatatggtatgagcgagaaacttggaccagttcaatacgaaggcaaccacgcaatgatggctggtcaaatgtcacctgaaaaatcatattctgctcaaactgcacaacttattgatgatgaagttcgtcaccttcttaatgaagcacgtaataaggcagctgatattatcaacgaaaaccgtgatactcataaattaattgcagaagccctcttaaaatatgagactcttgatgctgctcagattaaatcgatttttgagacaggtaaaatgcctgagacagaaaatgatgaagataaagcaagagcgttatcatacgatgaaatcaaagaaaaaatgcaagaagaagataaaaaataagtcatcatatatttttaaagaactttataaatttcaaatacccttcaaatttagataaaatttgaagggtattttttatgaagatgaagtttaaatttgtgaattaagaagatgaaatatgaacatgacaacggtaaaaatgctatccattcaacaagtatagaaggttagttactataaataatattaactttttaaaaataaaagaaaaaatgcaaaaatagtattgacaggaagtagaaatatttagtataatgaataagttgtctcgagagagcagcttctagtaacgcgtagttaacaacttaaaaaaaagtagttgacaaagcagaataagtttgctagaatatagaagttgtctcaagagaggcaaagacctttgaaaactgaacaagacgaacgaatgtgcagggtggatttacattgtaaatccgtcaatgacaaaaaaacaataaatctgtcagcgagacagaaaagagcaaagctcaaacttttaatgagagtttgatcctggctcaggacgaacgctggcggcgtgcctaatacatgcaagtagaacgctgaggtttggtgtttacactagactgatgagttgcgaacgggtgagtaacgcgtaggtaacctgcctcatagcgggggataactattggaaacgatagctaataccgcataagagtaattaacacatgttagttatttaaaaggagcaattgcttcactgtgagatggacctgcgttgtattagctagttggtgaggtaaaggctcaccaaggcgacgatacatagccgacctgagagggtgatcggccacactgggactgagacacggcccagactcctacgggaggcagcagtagggaatcttcggcaatggacggaagtctgaccgagcaacgccgcgtgagtgaagaaggttttcggatcgtaaagctctgttgttagagaagaacgttggtaggagtggaaaatctaccaagtgacggtaactaaccagaaagggacggctaactacgtgccagcagccgcggtaatacgtaggtcccgagcgttgtccggatttattgggcgtaaagcgagcgcaggcggttctttaagtctgaagttaaaggcagtggcttaaccattgtacgctttggaaactggaggacttgagtgcagaaggggagagtggaattccatgtgtagcggtgaaatgcgtagatatatggaggaacaccggtggcgaaagcggctctctggtctgtaactgacgctgaggctcgaaagcgtggggagcaaacaggattagataccctggtagtccacgccgtaaacgatgagtgctaggtgttaggccctttccggggcttagtgccgcagctaacgcattaagcactccgcctggggagtacgaccgcaaggttgaaactcaaaggaattgacgggggcccgcacaagcggtggagcatgtggtttaattcgaagcaacgcgaagaaccttaccaggtcttgacatccttctgaccggcctagagataggctttctcttcggagcagaagtgacaggtggtgcatggttgtcgtcagctcgtgtcgtgagatgttgggttaagtcccgcaacgagcgcaacccctattgttagttgccatcattaagttgggcactctagcgagactgccggtaataaaccggaggaaggtggggatgacgtcaaatcatcatgccccttatgacctgggctacacacgtgctacaatggttggtacaacgagtcgcaagccggtgacggcaagctaatctcttaaagccaatctcagttcggattgtaggctgcaactcgcctacatgaagtcggaatcgctagtaatcgcggatcagcacgccgcggtgaatacgttcccgggccttgtacacaccgcccgtcacaccacgagagtttgtaacacccgaagtcggtgaggtaaccttttaggagccagccgcctaaggtgggatagatgattggggtgaagtcgtaacaaggtagccgtatcggaaggtgcggctggatcacctcctttctaaggataaggaaacctgccatttgcgtcttgtttagttttgagaggtcttgtggggccttagctcagctgggagagcgcctgctttgcacgcaggaggtcagcggttcgatcccgctaggctccattgaatcgaaaggttcaaattgttcattgaaaattgaatatctatatcaaattccacgatctagaaatagattgtagaaagtaacaagaaaataaaccgaaaacgctgtgaatatttaatgagttttctagttttaaagaaactaggttaataaggttaagttaataagggcgcacggtggatgccttggcactagaagccgaagaaggacgtgactaacgacgaaatgctttggggagctgtaagtaagcgctgatccagagatgtccgaatgggggaacccactagttaatgactagtatccatatctgttaaggatatgagaaggaagacgcagtgaactgaaacatctaagtagctgcaggaagagaaagcaaaagcgattgccttagtagcggcgagcgaaacggcaggagggcaaaccgaagtgtttacacttcggggttgtaggactgcgatataggattaatcattatagaagaattacctgggaaggtaagccaaagagagtaacagcctcgtatttaaaatgatagattaaccttagcagtatcctgagtacggcgagacacgcgaaatctcgtcggaatctgggaggaccatctcccaaccctaaatactctctagtgaccgatagtgaaccagtaccgtgagggaaaggtgaaaagcaccccgggaggggagtgaaatagaacctgaaaccgtgtgcctacaacaagttcgagcccgttaatgggtgagagcgtgccttttgtagaatgaaccggcgagttacgatatgatgcgaggttaagttgaagagacggagccgtagggaaaccgagtcttaatagggcgtcatagtatcatgttgtagacccgaaaccatgtgacctacccatgagcaggttgaaggtgaggtaaaactcactggaggaccgaaccagggcacgttgaaaagtgcttggatgacttgtgggtagcggagaaattccaaacgaacttggagatagctggttctctccgaaatagctttagggctagcgtcgatgttaagtctcttggaggtagagcactgtttgggtgaggggtccatcccggattaccaatctcagataaactccgaatgccaacgagatataatcggcagtcagactgcgagtgctaagatccgtagtcgaaagggaaacagcccagaccaccagctaaggtcccaaaatatatgttaagtggaaaaggatgtggggttgcacagacaactaggatgttagcttagaagcagctattcattcaaagagtgcgtaatagctcactagtcgagtgaccctgcgccgaaaatgtaccggggctaaaacatattaccgaagctgtggatgacacaaaagtgtcatggtaggagagcgttctatgtgtgaagaaggtgtaccgtgaggagcgctggaacgcatagaagtgagaatgccggtatgagtagcgcaagacaggtgagaatcctgtccaccgtaagactaaggtttccaggggaaggctcgtccgccctgggttagtcgggacctaaggagagaccgaaaggtgtatccgatggacaacaggttgatattcctgtactagagtatatagtgatggagggacgcagtaggctaactaaaccagacgattggaagtgtctggtcaaacagtgaggtgtgatatgagtcaaatgcttatatctttaacattgagctgtgacgaggagcgaagtttagtagcgaagttagtgatgtcacactgccaagaaaagcttctagcgatacatatactctacccgtaccgcaaaccgacacaggtagtcgaggcgagtagcctcaggtgagcgagagaactctcgttaaggaactcggcaaaatggccccgtaacttcgggagaaggggcgctgattttagatcagccgcagtgaataggcccaagcaactgtttatcaaaaacacagctctctgctaaatcgtaagatgatgtatagggggtgacgcctgcccggtgctggaaggttaagaggagtgcttagcgtaagcgaaggtatgaattgaagccccagtaaacggcggccgtaactataacggtcctaaggtagcgaaattccttgtcgggtaagttccgacccgcacgaaaggcgtaatgatttgggcactgtctcaacgagagactcggtgaaattttagtacctgtgaagatgcaggttacccgcgacaggacggaaagaccccatggagctttactgcagtttgatattgagtatctgtaccacatgtacaggataggtaggagcctatgataacgggacgccagtttcgtttgaggcgttgttgggatactacccttgtgttatggctactctaacccagataggcaatccctatcggagacagtgtctgacgggcagtttgactggggcggtcgcctcctaaaaggtaacggaggcgcccaaaggttccctcagactggttggaaatcagtcgtagagtgtaaaggtataagggagcttgactgcgagagctacaactcgagcagggacgaaagtcgggcttagtgatccggtggttccgtatggaagggccatcgctcaacggataaaagctaccctggggataacaggcttatctcccccaagagttcacatcgacggggaggtttggcacctcgatgtcggctcgtcgcatcctggggctgtagtcggtcccaagggttgggctgttcgcccattaaagcggcacgcgagctgggttcagaacgtcgtgagacagttcggtccctatccgtcgcgggcgtaggaaatttgagaggatctgctcctagtacgagaggaccagagtggacttaccgctggtgtaccagttgtcttgccaaaggcatcgctgggtagctatgtagggaagggataagcgctgaaagcatctaagtgcgaagcccacctcaagatgagatttcccatgattttatatcagtaagagccctgagagatgatcaggtagataggttaggagtgtaattgtggtgacacatttagcggactaatactaatagctcgaggacttatccaaaaagagatattgacaacgttacggtttcttgttagactatagatattcaattttgagtgaataaggctcaatagttaagtgataattgcctaggagatacacctgttctcatgccgaacacagaagttaagccctagaacgccggaagtagttgggggttgccccctgtgagataaggtagtcgcttagcaaagggagtttagctcagctgggagagcatctgccttacaagcagagggtcagcggttcgatcccgttaactcccataggtcccgtagtgtagcggttatcacgtcgccctgtcacggcgaagatcgcgggttcgattcccgtcgggaccgtagactcgttagctcagttggtagagcaattgacttttaatcaatgggtcactggttcgagcccagtacgggtcatttagaaatgcgggtgtggcggaattggcagacgcaccagatttaggatctggcgcttaacggcgtgggggttcaagtcccttcacccgcattagtagattgccggcttagctcagttggtagagcatctgatttgtaatcagagggtcgcgtgttcaagtcatgtagccggcattacaattttataggataaatagtgtctttagtgcgaacgtagttcagtggtagaacatcaccttgccaaggtgagggtcgcgggttcgaaccccgtcgttcgcttgttagaggccggggtggcggaactggcagacgcacaggacttaaaatcctgcgatggtaaacatcgtaccggttcgattccggtcctcggcatataatatttagcacccttagctcaactggatagagtacctgactacgaatcaggcggttagaggttcgactcctctagggtgcatatttttcgggaagtagctcagcttggtagagtacttggtttgggaccaaggtgtcgcaggttcgaatcctgtcttcccgatggatatatttttatgatatatcattagacctttgaaaactgaacaagacgaacgaatgtgcagggtggatttacattgtaaatccgtcaatgacaaaaaacaataaatctgtcagcgagacagaaaagagcaaagctcaaacttttaatgagagtttgatcctggctcaggacgaacgctggcggcgtgcctaatacatgcaagtagaacgctgaggtttggtgtttacactagactgatgagttgcgaacgggtgagtaacgcgtaggtaacctgcctcatagcgggggataactattggaaacgatagctaataccgcataagagtaattaacacatgttagttatttaaaaggagcaattgcttcactgtgagatggacctgcgttgtattagctagttggtgaggtaaaggctcaccaaggcgacgatacatagccgacctgagagggtgatcggccacactgggactgagacacggcccagactcctacgggaggcagcagtagggaatcttcggcaatggacggaagtctgaccgagcaacgccgcgtgagtgaagaaggttttcggatcgtaaagctctgttgttagagaagaacgttggtaggagtggaaaatctaccaagtgacggtaactaaccagaaagggacggctaactacgtgccagcagccgcggtaatacgtaggtcccgagcgttgtccggatttattgggcgtaaagcgagcgcaggcggttctttaagtctgaagttaaaggcagtggcttaaccattgtacgctttggaaactggaggacttgagtgcagaaggggagagtggaattccatgtgtagcggtgaaatgcgtagatatatggaggaacaccggtggcgaaagcggctctctggtctgtaactgacgctgaggctcgaaagcgtggggagcaaacaggattagataccctggtagtccacgccgtaaacgatgagtgctaggtgttaggccctttccggggcttagtgccgcagctaacgcattaagcactccgcctggggagtacgaccgcaaggttgaaactcaaaggaattgacgggggcccgcacaagcggtggagcatgtggtttaattcgaagcaacgcgaagaaccttaccaggtcttgacatccttctgaccggcctagagataggctttctcttcggagcagaagtgacaggtggtgcatggttgtcgtcagctcgtgtcgtgagatgttgggttaagtcccgcaacgagcgcaacccctattgttagttgccatcattaagttgggcactctagcgagactgccggtaataaaccggaggaaggtggggatgacgtcaaatcatcatgccccttatgacctgggctacacacgtgctacaatggttggtacaacgagtcgcaagccggtgacggcaagctaatctcttaaagccaatctcagttcggattgtaggctgcaactcgcctacatgaagtcggaatcgctagtaatcgcggatcagcacgccgcggtgaatacgttcccgggccttgtacacaccgcccgtcacaccacgagagtttgtaacacccgaagtcggtgaggtaaccttttaggagccagccgcctaaggtgggatagatgattggggtgaagtcgtaacaaggtagccgtatcggaaggtgcggctggatcacctcctttctaaggataaggaaacctgccatttgcgtcttgtttagttttgagaggtcttgtggggccttagctcagctgggagagcgcctgctttgcacgcaggaggtcagcggttcgatcccgctaggctccattgaatcgaaaggttcaaattgttcattgaaaattgaatatctatatcaaattccacgatctagaaatagattgtagaaagtaacaagaaaataaaccgaaaacgctgtgaatatttaatgagttttctagttttaaagaaactaggttaataaggttaagttaataagggcgcacggtggatgccttggcactagaagccgaagaaggacgtgactaacgacgaaatgctttggggagctgtaagtaagcgctgatccagagatgtccgaatgggggaacccactagttaatgactagtatccatatctgttaaggatatgagaaggaagacgcagtgaactgaaacatctaagtagctgcaggaagagaaagcaaaagcgattgccttagtagcggcgagcgaaacggcaggagggcaaaccgaagtgtttacacttcggggttgtaggactgcgatataggattaatcattatagaagaattacctgggaaggtaagccaaagagagtaacagcctcgtatttaaaatgatagattaaccttagcagtatcctgagtacggcgagacacgcgaaatctcgtcggaatctgggaggaccatctcccaaccctaaatactctctagtgaccgatagtgaaccagtaccgtgagggaaaggtgaaaagcaccccgggaggggagtgaaatagaacctgaaaccgtgtgcctacaacaagttcgagcccgttaatgggtgagagcgtgccttttgtagaatgaaccggcgagttacgatatgatgcgaggttaagttgaagagacggagccgtagggaaaccgagtcttaatagggcgtcatagtatcatgttgtagacccgaaaccatgtgacctacccatgagcaggttgaaggtgaggtaaaactcactggaggaccgaaccagggcacgttgaaaagtgcttggatgacttgtgggtagcggagaaattccaaacgaacttggagatagctggttctctccgaaatagctttagggctagcgtcgatgttaagtctcttggaggtagagcactgtttgggtgaggggtccatcccggattaccaatctcagataaactccgaatgccaacgagatataatcggcagtcagactgcgagtgctaagatccgtagtcgaaagggaaacagcccagaccaccagctaaggtcccaaaatatatgttaagtggaaaaggatgtggggttgcacagacaactaggatgttagcttagaagcagctattcattcaaagagtgcgtaatagctcactagtcgagtgaccctgcgccgaaaatgtaccggggctaaaacatattaccgaagctgtggatgacacaaaagtgtcatggtaggagagcgttctatgtgtgaagaaggtgtaccgtgaggagcgctggaacgcatagaagtgagaatgccggtatgagtagcgcaagacaggtgagaatcctgtccaccgtaagactaaggtttccaggggaaggctcgtccgccctgggttagtcgggacctaaggagagaccgaaaggtgtatccgatggacaacaggttgatattcctgtactagagtatatagtgatggagggacgcagtaggctaactaaaccagacgattggaagtgtctggtcaaacagtgaggtgtgatatgagtcaaatgcttatatctttaacattgagctgtgacgaggagcgaagtttagtagcgaagttagtgatgtcacactgccaagaaaagcttctagcgatacatatactctacccgtaccgcaaaccgacacaggtagtcgaggcgagtagcctcaggtgagcgagagaactctcgttaaggaactcggcaaaatggccccgtaacttcgggagaaggggcgctgattttagatcagccgcagtgaataggcccaagcaactgtttatcaaaaacacagctctctgctaaatcgtaagatgatgtatagggggtgacgcctgcccggtgctggaaggttaagaggagtgcttagcgtaagcgaaggtatgaattgaagccccagtaaacggcggccgtaactataacggtcctaaggtagcgaaattccttgtcgggtaagttccgacccgcacgaaaggcgtaatgatttgggcactgtctcaacgagagactcggtgaaattttagtacctgtgaagatgcaggttacccgcgacaggacggaaagaccccatggagctttactgcagtttgatattgagtatctgtaccacatgtacaggataggtaggagcctatgataacgggacgccagtttcgtttgaggcgttgttgggatactacccttgtgttatggctactctaacccagataggcaatccctatcggagacagtgtctgacgggcagtttgactggggcggtcgcctcctaaaaggtaacggaggcgcccaaaggttccctcagactggttggaaatcagtcgtagagtgtaaaggtataagggagcttgactgcgagagctacaactcgagcagggacgaaagtcgggcttagtgatccggtggttccgtatggaagggccatcgctcaacggataaaagctaccctggggataacaggcttatctcccccaagagttcacatcgacggggaggtttggcacctcgatgtcggctcgtcgcatcctggggctgtagtcggtcccaagggttgggctgttcgcccattaaagcggcacgcgagctgggttcagaacgtcgtgagacagttcggtccctatccgtcgcgggcgtaggaaatttgagaggatctgctcctagtacgagaggaccagagtggacttaccgctggtgtaccagttgtcttgccaaaggcatcgctgggtagctatgtagggaagggataagcgctgaaagcatctaagtgcgaagcccacctcaagatgagatttcccatgattttatatcagtaagagccctgagagatgatcaggtagataggttaggagtgtaattgtggtgacacatttagcggactaatactaatagctcgaggacttatccaaaaagagatattgacaacgttacggtttcttgttagactatagatattcaattttgagtgaataaggctcaatagttaagtgataattgcctaggagatacacctgttctcatgccgaacacagaagttaagccctagaacgccggaagtagttgggggttgccccctgtgagataaggtagtcgcttagcaaagggagtttagctcagctgggagagcatctgccttacaagcagagggtcagcggttcgatcccgttaactcccataggtcccgtagtgtagcggttatcacgtcgccctgtcacggcgaagatcgcgggttcgattcccgtcgggaccgtagactcgttagctcagttggtagagcaattgacttttaatcaatgggtcactggttcgagcccagtacgggtcatttagaaatgcgggtgtggcggaattggcagacgcaccagatttaggatctggcgcttaacggcgtgggggttcaagtcccttcacccgcattagtagattgccggcttagctcagttggtagagcatctgatttgtaatcagagggtcgcgtgttcaagtcatgtagccggcattacaattttataggataaatagtgtctttagtgcgaacgtagttcagtggtagaacatcaccttgccaaggtgagggtcgcgggttcgaaccccgtcgttcgcttgttagaggccggggtggcggaactggcagacgcacaggacttaaaatcctgcgatggtaaacatcgtaccggttcgattccggtcctcggcatataatatttagcacccttagctcaactggatagagtacctgactacgaatcaggcggttagaggttcgactcctctagggtgcatatttttcgggaagtagctcagcttggtagagtacttggtttgggaccaaggtgtcgcaggttcgaatcctgtcttcccgatggatatatttttatggcggtgtagctcagctggctagagcgtccggttcatacccgggaggtcgggggttcgatcccctccgccgctatttattttattgagactttggacctttagctcaactggttagagcactcggctcataaccgagcggtcgtaggttcgagtcctacaaggtccatattttttgttatatggaggattacccaagtccggctgaagggaacggtcttgaaaaccgtcaggcgtgtaaaagcgtgcgtgggttcgaatcccacatcctcctttaaagatatcgcgggatggagcagctaggtagctcgtcgggctcataacccgaaggtcgtaggttcaaatcctgctcccgcaataggctcggtagctcagttggtagagcaatggattgaagctccatgtgtcggcggttcgattccgtctcgcgccatttattatataagtttttagcgggtgtagtttagtggtaaaactacagccttccaagctgttgtcgcgagttcgattctcgtcacccgcttactttacataaaagtaaaaccaagcatttgcttgggcgcgtagctcaggtggttagagcgcacgcctgataagcgtgaggtcggtggttcgagtccactcgtgcccattaatattaatttggagaattactcaagaggctgaagaggacggtttgctaaatcgttaggtcgggtaactggcgcaagggttcgaatcccttattctccgtaaatattataattttaagagtaattatactctttttttatttctcttttagtttcactatggagtaattatattgatagagtgaatagaagaaggttatcgttttctagatttgattatg

SEQ ID NO: 10968 - DNA, 50 bp, Artificial Sequence
  Amplification primer (forwards)
ggggacaagtttgtacaaaaaagcaggctctcaatctcatattgtttcag

SEQ ID NO: 10969 - DNA, 52 bp, Artificial Sequence
  Amplification primer (forwards)
ggggacaagtttgtacaaaaaagcaggctctaattacattattacatttttg

SEQ ID NO: 10970 - DNA, 51 bp, Artificial Sequence
  Amplification primer (forwards)
ggggacaagtttgtacaaaaaagcaggctctgatactagttcaggaatatc

SEQ ID NO: 10971 - DNA, 52 bp, Artificial Sequence
  Amplification primer (forwards)
ggggacaagtttgtacaaaaaagcaggctctgatacaagtgataagaatact

SEQ ID NO: 10972 - DNA, 50 bp, Artificial Sequence
  Amplification primer (forwards)
ggggacaagtttgtacaaaaaagcaggctctatttttcttcatagtccac

SEQ ID NO: 10973 - DNA, 50 bp, Artificial Sequence
  Amplification primer (forwards)
ggggacaagtttgtacaaaaaagcaggctctgaatgggtgttattaactc

SEQ ID NO: 10974 - DNA, 51 bp, Artificial Sequence
  Amplification primer (forwards)
ggggacaagtttgtacaaaaaagcaggctctacaaattcttattttagcaa

SEQ ID NO: 10975 - DNA, 47 bp, Artificial Sequence
  Amplification primer (forwards)
ggggacaagtttgtacaaaaaagcaggctctgtatcagttcaggcgt

SEQ ID NO: 10976 - DNA, 47 bp, Artificial Sequence
  Amplification primer (forwards)
ggggacaagtttgtacaaaaaagcaggctctgctgctctaggacaac

SEQ ID NO: 10977 - DNA, 48 bp, Artificial Sequence
  Amplification primer (forwards)
ggggacaagtttgtacaaaaaagcaggctcttttgttgttgccttatt

SEQ ID NO: 10978 - DNA, 46 bp, Artificial Sequence
  Amplification primer (forwards)
ggggacaagtttgtacaaaaaagcaggctctccacctatggaacgt

SEQ ID NO: 10979 - DNA, 47 bp, Artificial Sequence
  Amplification primer (forwards)
ggggacaagtttgtacaaaaaagcaggctctcagaaagtctatcggg

SEQ ID NO: 10980 - DNA, 49 bp, Artificial Sequence
  Amplification primer (forwards)
ggggacaagtttgtacaaaaaagcaggctctagtgagaagaaagcaaat

SEQ ID NO: 10981 - DNA, 48 bp, Artificial Sequence
  Amplification primer (forwards)
ggggacaagtttgtacaaaaaagcaggctcttcttggaattattggag

SEQ ID NO: 10982 - DNA, 48 bp, Artificial Sequence
  Amplification primer (forwards)
ggggacaagtttgtacaaaaaagcaggctctgcaatgattgtaaccat

SEQ ID NO: 10983 - DNA, 48 bp, Artificial Sequence
  Amplification primer (forwards)
ggggacaagtttgtacaaaaaagcaggctctgcatcttataccgtgaa

SEQ ID NO: 10984 - DNA, 46 bp, Artificial Sequence
  Amplification primer (forwards)
ggggacaagtttgtacaaaaaagcaggctctgccgagaaggataaa

SEQ ID NO: 10985 - DNA, 51 bp, Artificial Sequence
  Amplification primer (forwards)
ggggacaagtttgtacaaaaaagcaggctctgtttataaagttattcaaaa

SEQ ID NO: 10986 - DNA, 48 bp, Artificial Sequence
  Amplification primer (forwards)
ggggacaagtttgtacaaaaaagcaggctctaagcctaacagtcaaca

SEQ ID NO: 10987 - DNA, 50 bp, Artificial Sequence
  Amplification primer (forwards)
ggggacaagtttgtacaaaaaagcaggctctgatgataactttgaaatgc

SEQ ID NO: 10988 - DNA, 47 bp, Artificial Sequence
  Amplification primer (forwards)
ggggacaagtttgtacaaaaaagcaggctctgcagtgattgcaagtc

SEQ ID NO: 10989 - DNA, 43 bp, Artificial Sequence
  Amplification primer (forwards)
ggggacaagtttgtacaaaaaagcaggctgtgctgcatcaaac

SEQ ID NO: 10990 - DNA, 43 bp, Artificial Sequence; identical to SEQ ID NO: 10989
  Amplification primer (forwards)

SEQ ID NO: 10991 - DNA, 46 bp, Artificial Sequence
  Amplification primer (forwards)
ggggacaagtttgtacaaaaaagcaggctgtactaaacaaagccag

SEQ ID NO: 10992 - DNA, 45 bp, Artificial Sequence
  Amplification primer (forwards)
ggggacaagtttgtacaaaaaagcaggctgtcaattaaccgatac

SEQ ID NO: 10993 - DNA, 44 bp, Artificial Sequence
  Amplification primer (forwards)
ggggacaagtttgtacaaaaaagcaggctgctcaaatgattcat

SEQ ID NO: 10994 - DNA, 52 bp, Artificial Sequence
  Amplification primer (forwards)
ggggacaagtttgtacaaaaaagcaggctctaaaagttcacaagttactact

SEQ ID NO: 10995 - DNA, 51 bp, Artificial Sequence
  Amplification primer (forwards)
ggggacaagtttgtacaaaaaagcaggctctagtcattattccataaaatt

SEQ ID NO: 10996 - DNA, 49 bp, Artificial Sequence
  Amplification primer (forwards)
ggggacaagtttgtacaaaaaagcaggctctaatcatatgctgattgag

SEQ ID NO: 10997 - DNA, 45 bp, Artificial Sequence
  Amplification primer (forwards)
ggggacaagtttgtacaaaaaagcaggctcagtttggatgttaac

SEQ ID NO: 10998 - DNA, 44 bp, Artificial Sequence
  Amplification primer (forwards)
ggggacaagtttgtacaaaaaagcaggctcaacaaatgcagatg

SEQ ID NO: 10999 - DNA, 48 bp, Artificial Sequence
  Amplification primer (forwards)
ggggacaagtttgtacaaaaaagcaggctgttttgtcattattgatag

SEQ ID NO: 11000 - DNA, 51 bp, Artificial Sequence
  Amplification primer (forwards)
ggggacaagtttgtacaaaaaagcaggctctctaacttggtttttattaga

SEQ ID NO: 11001 - DNA, 49 bp, Artificial Sequence
  Amplification primer (forwards)
ggggacaagtttgtacaaaaaagcaggctctggtttaaaagtgactgaa

SEQ ID NO: 11002 - DNA, 49 bp, Artificial Sequence
  Amplification primer (forwards)
ggggacaagtttgtacaaaaaagcaggctctcatcatttaggtaaggaa

SEQ ID NO: 11003 - DNA, 50 bp, Artificial Sequence
  Amplification primer (forwards)
ggggacaagtttgtacaaaaaagcaggctctgttagtaatcgctacaatc

SEQ ID NO: 11004 - DNA, 48 bp, Artificial Sequence
  Amplification primer (forwards)
ggggacaagtttgtacaaaaaagcaggctctaatcaagaagtttcagc

SEQ ID NO: 11005 - DNA, 47 bp, Artificial Sequence
  Amplification primer (forwards)
ggggacaagtttgtacaaaaaagcaggctctcgagttttagcggata

SEQ ID NO: 11006 - DNA, 51 bp, Artificial Sequence
  Amplification primer (forwards)
ggggacaagtttgtacaaaaaagcaggctctgtattattttaccaatcaca

SEQ ID NO: 11007 - DNA, 46 bp, Artificial Sequence
  Amplification primer (forwards)
ggggacaagtttgtacaaaaaagcaggcttaggagtggtagttcat

SEQ ID NO: 11008 - DNA, 48 bp, Artificial Sequence
  Amplification primer (forwards)
ggggacaagtttgtacaaaaaagcaggctttttattgttagtattagc

SEQ ID NO: 11009 - DNA, 49 bp, Artificial Sequence
  Amplification primer (forwards)
ggggacaagtttgtacaaaaaagcaggctctgtttatctagcggttaga

SEQ ID NO: 11010 - DNA, 50 bp, Artificial Sequence
  Amplification primer (forwards)
ggggacaagtttgtacaaaaaagcaggctataacagtttagttagaagtc

SEQ ID NO: 11011 - DNA, 47 bp, Artificial Sequence
  Amplification primer (forwards)
ggggacaagtttgtacaaaaaagcaggctttaaagggtttacatatt

SEQ ID NO: 11012 - DNA, 45 bp, Artificial Sequence
  Amplification primer (forwards)
ggggacaagtttgtacaaaaaagcaggctttaatacaattggtcg

SEQ ID NO: 11013 - DNA, 49 bp, Artificial Sequence
  Amplification primer (forwards)
ggggacaagtttgtacaaaaaagcaggctctatggaaaaaattaggatt

SEQ ID NO: 11014 - DNA, 49 bp, Artificial Sequence
  Amplification primer (forwards)
ggggacaagtttgtacaaaaaagcaggctctagagatgagcaagaaata

SEQ ID NO: 11015 - DNA, 51 bp, Artificial Sequence
  Amplification primer (forwards)
ggggacaagtttgtacaaaaaagcaggctctcaacagataggtctttataa

SEQ ID NO: 11016 - DNA, 49 bp, Artificial Sequence
  Amplification primer (forwards)
ggggacaagtttgtacaaaaaagcaggctttctctataattacttcaat

SEQ ID NO: 11017 - DNA, 50 bp, Artificial Sequence
  Amplification primer (forwards)
ggggacaagtttgtacaaaaaagcaggctctaataaggcattattagagg

SEQ ID NO: 11018 - DNA, 51 bp, Artificial Sequence
  Amplification primer (forwards)
ggggacaagtttgtacaaaaaagcaggctctacacatttagttgacttaac

SEQ ID NO: 11019 - DNA, 52 bp, Artificial Sequence
  Amplification primer (forwards)
ggggacaagtttgtacaaaaaagcaggctctagtaaacaacacatttatcta

SEQ ID NO: 11020 - DNA, 49 bp, Artificial Sequence
  Amplification primer (forwards)
ggggacaagtttgtacaaaaaagcaggctctcaagaaactcatcagttg

SEQ ID NO: 11021 - DNA, 49 bp, Artificial Sequence
  Amplification primer (forwards)
ggggacaagtttgtacaaaaaagcaggctctgcagaagacattgttaca

SEQ ID NO: 11022 - DNA, 48 bp, Artificial Sequence
  Amplification primer (forwards)
ggggacaagtttgtacaaaaaagcaggctataatttttcgactaatga

SEQ ID NO: 11023 - DNA, 49 bp, Artificial Sequence
  Amplification primer (forwards)
ggggacaagtttgtacaaaaaagcaggctctgacacagtgtcttatcct

SEQ ID NO: 11024 - DNA, 47 bp, Artificial Sequence
  Amplification primer (forwards)
ggggacaagtttgtacaaaaaagcaggctctgtggagcaagtggcca

SEQ ID NO: 11025 - DNA, 51 bp, Artificial Sequence
  Amplification primer (forwards)
ggggacaagtttgtacaaaaaagcaggctctcaagaactaagtaactttga

SEQ ID NO: 11026 - DNA, 48 bp, Artificial Sequence
  Amplification primer (forwards)
ggggacaagtttgtacaaaaaagcaggctctactgaaacgtttgaagg

SEQ ID NO: 11027 - DNA, 48 bp, Artificial Sequence
  Amplification primer (forwards)
ggggacaagtttgtacaaaaaagcaggctctgatgaagcaacaactaa

SEQ ID NO: 11028 - DNA, 52 bp, Artificial Sequence
  Amplification primer (forwards)
ggggacaagtttgtacaaaaaagcaggctctaataaagataatcaaaaaact

SEQ ID NO: 11029 - DNA, 46 bp, Artificial Sequence
  Amplification primer (forwards)
ggggacaagtttgtacaaaaaagcaggctgtttcttttttattcca

SEQ ID NO: 11030 - DNA, 48 bp, Artificial Sequence
  Amplification primer (forwards)
ggggacaagtttgtacaaaaaagcaggctattactttgatggtagttt

SEQ ID NO: 11031 - DNA, 48 bp, Artificial Sequence
  Amplification primer (forwards)
ggggacaagtttgtacaaaaaagcaggctctgttcaatcattagcaaa

SEQ ID NO: 11032 - DNA, 49 bp, Artificial Sequence
  Amplification primer (forwards)
ggggacaagtttgtacaaaaaagcaggctttaaaggtaataagaagttg

SEQ ID NO: 11033 - DNA, 50 bp, Artificial Sequence
  Amplification primer (forwards)
ggggacaagtttgtacaaaaaagcaggctctagtcaagttgactctgtta

SEQ ID NO: 11034 - DNA, 47 bp, Artificial Sequence
  Amplification primer (forwards)
ggggacaagtttgtacaaaaaagcaggctctcaaaaccaggtgactg

SEQ ID NO: 11035 - DNA, 48 bp, Artificial Sequence
  Amplification primer (forwards)
ggggacaagtttgtacaaaaaagcaggcttaagattttataacaacga

SEQ ID NO: 11036 - DNA, 47 bp, Artificial Sequence
  Amplification primer (forwards)
ggggacaagtttgtacaaaaaagcaggctctaatgttttaggggaaa

SEQ ID NO: 11037 - DNA, 44 bp, Artificial Sequence
  Amplification primer (forwards)
ggggacaagtttgtacaaaaaagcaggctcccaaaagacttttg

SEQ ID NO: 11038 - DNA, 44 bp, Artificial Sequence; identical to SEQ ID NO: 11037
  Amplification primer (forwards)

SEQ ID NO: 11039 - DNA, 48 bp, Artificial Sequence
  Amplification primer (forwards)
ggggacaagtttgtacaaaaaagcaggctctaaagttttagcctttga

SEQ ID NO: 11040 - DNA, 44 bp, Artificial Sequence
  Amplification primer (forwards)
ggggacaagtttgtacaaaaaagcaggctctgaaatggctttag

SEQ ID NO: 11041 - DNA, 53 bp, Artificial Sequence
  Amplification primer (forwards)
ggggacaagtttgtacaaaaaagcaggctctactaacttattgagtagaatca

SEQ ID NO: 11042 - DNA, 46 bp, Artificial Sequence
  Amplification primer (forwards)
ggggacaagtttgtacaaaaaagcaggctgtagctcaaaatctcat

SEQ ID NO: 11043 - DNA, 52 bp, Artificial Sequence
  Amplification primer (forwards)
ggggacaagtttgtacaaaaaagcaggctctagtttatctattaaagatgcc

SEQ ID NO: 11044 - DNA, 47 bp, Artificial Sequence
  Amplification primer (forwards)
ggggacaagtttgtacaaaaaagcaggctctatcaaagaggcggtaa

SEQ ID NO: 11045 - DNA, 50 bp, Artificial Sequence
  Amplification primer (forwards)
ggggacaagtttgtacaaaaaagcaggctctaaagaggataaaaagctag

SEQ ID NO: 11046 - DNA, 50 bp, Artificial Sequence
  Amplification primer (forwards)
ggggacaagtttgtacaaaaaagcaggctctagtgtttcaggtagtagtg

SEQ ID NO: 11047 - DNA, 50 bp, Artificial Sequence
  Amplification primer (forwards)
ggggacaagtttgtacaaaaaagcaggctctaaaaaattaaaacactcaa

SEQ ID NO: 11048 - DNA, 50 bp, Artificial Sequence
  Amplification primer (forwards)
ggggacaagtttgtacaaaaaagcaggctctgatgaagttacaacttcag

SEQ ID NO: 11049 - DNA, 48 bp, Artificial Sequence
  Amplification primer (forwards)
ggggacaagtttgtacaaaaaagcaggcttattccaaagtaaaataaa

SEQ ID NO: 11050 - DNA, 56 bp, Artificial Sequence
  Amplification primer (forwards)
ggggacaagtttgtacaaaaaagcaggctctcataaccatcactcagaacacatgt

SEQ ID NO: 11051 - DNA, 48 bp, Artificial Sequence
  Amplification primer (forwards)
ggggacaagtttgtacaaaaaagcaggctctcccaagaataggataaa

SEQ ID NO: 11052 - DNA, 50 bp, Artificial Sequence
  Amplification primer (forwards)
ggggacaagtttgtacaaaaaagcaggctctagtcagtatgagtcacaga

SEQ ID NO: 11053 - DNA, 48 bp, Artificial Sequence
  Amplification primer (forwards)
ggggacaagtttgtacaaaaaagcaggctctgcagaagtgtcacaaga

SEQ ID NO: 11054 - DNA, 45 bp, Artificial Sequence
  Amplification primer (forwards)
ggggacaagtttgtacaaaaaagcaggctcttttgatggattttt

SEQ ID NO: 11055 - DNA, 48 bp, Artificial Sequence
  Amplification primer (forwards)
ggggacaagtttgtacaaaaaagcaggctctacaaatgaaaaacgaac

SEQ ID NO: 11056 - DNA, 52 bp, Artificial Sequence
  Amplification primer (forwards)
ggggacaagtttgtacaaaaaagcaggctctgaaattaaactcaaaaatatt

SEQ ID NO: 11057 - DNA, 50 bp, Artificial Sequence
  Amplification primer (forwards)
ggggacaagtttgtacaaaaaagcaggctctcatactcaagaacacaaaa

SEQ ID NO: 11058 - DNA, 51 bp, Artificial Sequence
  Amplification primer (forwards)
ggggacaagtttgtacaaaaaagcaggctctcctaagaagaaatcagatac

SEQ ID NO: 11059 - DNA, 50 bp, Artificial Sequence
  Amplification primer (forwards)
ggggacaagtttgtacaaaaaagcaggctctgcagaactaactcttttaa

SEQ ID NO: 11060 - DNA, 51 bp, Artificial Sequence
  Amplification primer (forwards)
ggggacaagtttgtacaaaaaagcaggctctgcggatacatataataacta

SEQ ID NO: 11061 - DNA, 46 bp, Artificial Sequence
  Amplification primer (forwards)
ggggacaagtttgtacaaaaaagcaggctcttaccaaaaaatgacg

SEQ ID NO: 11062 - DNA, 48 bp, Artificial Sequence
  Amplification primer (forwards)
ggggacaagtttgtacaaaaaagcaggctctgaagagcttaccaaaac

SEQ ID NO: 11063 - DNA, 51 bp, Artificial Sequence
  Amplification primer (forwards)
ggggacaagtttgtacaaaaaagcaggctctagatatacaaatggaaattt

SEQ ID NO: 11064 - DNA, 50 bp, Artificial Sequence
  Amplification primer (forwards)
ggggacaagtttgtacaaaaaagcaggctctaaaaaaggacaagtaaatg

SEQ ID NO: 11065 - DNA, 50 bp, Artificial Sequence
  Amplification primer (forwards)
ggggacaagtttgtacaaaaaagcaggctctgattctgtcataaataagc

SEQ ID NO: 11066 - DNA, 47 bp, Artificial Sequence
  Amplification primer (forwards)
ggggacaagtttgtacaaaaaagcaggctctgaattttcacgagaaa

SEQ ID NO: 11067 - DNA, 48 bp, Artificial Sequence
  Amplification primer (forwards)
ggggacaagtttgtacaaaaaagcaggctaccaattaggtagctataa

SEQ ID NO: 11068 - DNA, 51 bp, Artificial Sequence
  Amplification primer (forwards)
ggggacaagtttgtacaaaaaagcaggctctgttaatacaaaaacacttct

SEQ ID NO: 11069 - DNA, 50 bp, Artificial Sequence
  Amplification primer (forwards)
ggggacaagtttgtacaaaaaagcaggctctggtcagtctaaaaatgaag

SEQ ID NO: 11070 - DNA, 47 bp, Artificial Sequence
  Amplification primer (forwards)
ggggacaagtttgtacaaaaaagcaggctctagccaggaggtatatg

SEQ ID NO: 11071 - DNA, 50 bp, Artificial Sequence
  Amplification primer (forwards)
ggggacaagtttgtacaaaaaagcaggctctgaaactattaatccagaaa

SEQ ID NO: 11072 - DNA, 49 bp, Artificial Sequence
  Amplification primer (forwards)
ggggacaagtttgtacaaaaaagcaggctctacaagtatgaaccatcaa

SEQ ID NO: 11073 - DNA, 47 bp, Artificial Sequence
  Amplification primer (forwards)
ggggacaagtttgtacaaaaaagcaggctctaaggggccaaaagtag

SEQ ID NO: 11074 - DNA, 54 bp, Artificial Sequence
  Amplification primer (forwards)
ggggacaagtttgtacaaaaaagcaggctctattactttagaaaaatttataga

SEQ ID NO: 11075 - DNA, 47 bp, Artificial Sequence
  Amplification primer (forwards)
ggggacaagtttgtacaaaaaagcaggctctgccttttactttggca

SEQ ID NO: 11076 - DNA, 48 bp, Artificial Sequence
  Amplification primer (forwards)
ggggacaagtttgtacaaaaaagcaggctctattttttccttgatcat

SEQ ID NO: 11077 - DNA, 47 bp, Artificial Sequence
  Amplification primer (forwards)
ggggacaagtttgtacaaaaaagcaggctctggtgaaacccaagata

SEQ ID NO: 11078 - DNA, 45 bp, Artificial Sequence
  Amplification primer (forwards)
ggggacaagtttgtacaaaaaagcaggcttaacaattcatggacc

SEQ ID NO: 11079 - DNA, 45 bp, Artificial Sequence; identical to SEQ ID NO: 11078
  Amplification primer (forwards)

SEQ ID NO: 11080 - DNA, 47 bp, Artificial Sequence
  Amplification primer (forwards)
ggggacaagtttgtacaaaaaagcaggctctcaaggacctcccggtg

SEQ ID NO: 11081 - DNA, 48 bp, Artificial Sequence
  Amplification primer (forwards)
ggggacaagtttgtacaaaaaagcaggctctcaaaatcaaaattcaca

SEQ ID NO: 11082 - DNA, 47 bp, Artificial Sequence
  Amplification primer (forwards)
ggggacaagtttgtacaaaaaagcaggctctctggagccttttattt

SEQ ID NO: 11083 - DNA, 49 bp, Artificial Sequence
  Amplification primer (forwards)
ggggacaagtttgtacaaaaaagcaggctctggtaatcgttcagataag

SEQ ID NO: 11084 - DNA, 47 bp, Artificial Sequence
  Amplification primer (forwards)
ggggacaagtttgtacaaaaaagcaggctctatccagcagatcaact

SEQ ID NO: 11085 - DNA, 47 bp, Artificial Sequence
  Amplification primer (forwards)
ggggacaagtttgtacaaaaaagcaggctctaaacgggttcgctatg

SEQ ID NO: 11086 - DNA, 50 bp, Artificial Sequence
  Amplification primer (forwards)
ggggacaagtttgtacaaaaaagcaggctctgtaaaattagtattcgcac

SEQ ID NO: 11087 - DNA, 48 bp, Artificial Sequence
  Amplification primer (forwards)
ggggacaagtttgtacaaaaaagcaggctctgttagcgttgataaggc

SEQ ID NO: 11088 - DNA, 50 bp, Artificial Sequence
  Amplification primer (forwards)
ggggacaagtttgtacaaaaaagcaggctctacaattaaaaatctcactg

SEQ ID NO: 11089 - DNA, 52 bp, Artificial Sequence
  Amplification primer (forwards)
ggggacaagtttgtacaaaaaagcaggctctagtaaaatcaaaattgtaacg

SEQ ID NO: 11090 - DNA, 50 bp, Artificial Sequence
  Amplification primer (forwards)
ggggacaagtttgtacaaaaaagcaggctctaatcttttaattatgggtt

SEQ ID NO: 11091 - DNA, 48 bp, Artificial Sequence
  Amplification primer (forwards)
ggggacaagtttgtacaaaaaagcaggctttcaatactatttaaaagg

SEQ ID NO: 11092 - DNA, 47 bp, Artificial Sequence
  Amplification primer (forwards)
ggggacaagtttgtacaaaaaagcaggctctaccgaggagccattaa

SEQ ID NO: 11093 - DNA, 49 bp, Artificial Sequence
  Amplification primer (forwards)
ggggacaagtttgtacaaaaaagcaggctctgaacaatcacaaaaaaca

SEQ ID NO: 11094 - DNA, 47 bp, Artificial Sequence
  Amplification primer (forwards)
ggggacaagtttgtacaaaaaagcaggctctatggtgacggtgctgg

SEQ ID NO: 11095 - DNA, 47 bp, Artificial Sequence
  Amplification primer (forwards)
ggggacaagtttgtacaaaaaagcaggctctagtcagccggtagggg

SEQ ID NO: 11096 - DNA, 47 bp, Artificial Sequence
  Amplification primer (forwards)
ggggacaagtttgtacaaaaaagcaggctctggtggagcatttgcta

SEQ ID NO: 11097 - DNA, 52 bp, Artificial Sequence; identical to SEQ ID NO: 11028
  Amplification primer (forwards)

SEQ ID NO: 11098 - DNA, 47 bp, Artificial Sequence
  Amplification primer (forwards)
ggggacaagtttgtacaaaaaagcaggctctgctgccaccaagaaag

SEQ ID NO: 11099 - DNA, 48 bp, Artificial Sequence
  Amplification primer (forwards)
ggggacaagtttgtacaaaaaagcaggctctacaacaaatgtaatggc

SEQ ID NO: 11100 - DNA, 46 bp, Artificial Sequence
  Amplification primer (forwards)
ggggacaagtttgtacaaaaaagcaggctcaatgaatttttcattt

SEQ ID NO: 11101 - DNA, 49 bp, Artificial Sequence
  Amplification primer (forwards)
ggggacaagtttgtacaaaaaagcaggctctacaaaatatcagcgaatg

SEQ ID NO: 11102 - DNA, 48 bp, Artificial Sequence
  Amplification primer (forwards)
ggggacaagtttgtacaaaaaagcaggctctactaagcaagcaatgtc

SEQ ID NO: 11103 - DNA, 52 bp, Artificial Sequence
  Amplification primer (forwards)
ggggacaagtttgtacaaaaaagcaggctctacaaaagaatatcaaaattat

SEQ ID NO: 11104 - DNA, 45 bp, Artificial Sequence
  Amplification primer (forwards)
ggggacaagtttgtacaaaaaagcaggctcgactaattcgttaaa

SEQ ID NO: 11105 - DNA, 47 bp, Artificial Sequence
  Amplification primer (forwards)
ggggacaagtttgtacaaaaaagcaggctttgaaatagtattggaaa

SEQ ID NO: 11106 - DNA, 54 bp, Artificial Sequence
  Amplification primer (forwards)
ggggacaagtttgtacaaaaaagcaggctctatattttctattttttattatgt

SEQ ID NO: 11107 - DNA, 49 bp, Artificial Sequence
  Amplification primer (forwards)
ggggacaagtttgtacaaaaaagcaggctctaaaaaacaacttcacaac

SEQ ID NO: 11108 - DNA, 51 bp, Artificial Sequence
  Amplification primer (forwards)
ggggacaagtttgtacaaaaaagcaggctctaaaacagatattgaaatagc

SEQ ID NO: 11109 - DNA, 51 bp, Artificial Sequence
  Amplification primer (forwards)
ggggacaagtttgtacaaaaaagcaggctctattaaatattatcatttgca

SEQ ID NO: 11110 - DNA, 47 bp, Artificial Sequence
  Amplification primer (forwards)
ggggacaagtttgtacaaaaaagcaggctctgctttacggaaccttg

SEQ ID NO: 11111 - DNA, 52 bp, Artificial Sequence
  Amplification primer (forwards)
ggggacaagtttgtacaaaaaagcaggctctactatttctcaacaacaatac

SEQ ID NO: 11112 - DNA, 51 bp, Artificial Sequence
  Amplification primer (forwards)
ggggacaagtttgtacaaaaaagcaggctctgaaaaaaagagtagttcaac

SEQ ID NO: 11113 - DNA, 50 bp, Artificial Sequence
  Amplification primer (forwards)
ggggacaagtttgtacaaaaaagcaggctctaatcaattatcagaaatca

SEQ ID NO: 11114 - DNA, 52 bp, Artificial Sequence
  Amplification primer (forwards)
ggggacaagtttgtacaaaaaagcaggctctcaagagtataaaacaaaagag

SEQ ID NO: 11115 - DNA, 49 bp, Artificial Sequence
  Amplification primer (forwards)
ggggacaagtttgtacaaaaaagcaggctctgctgtatttacactcgtc

SEQ ID NO: 11116 - DNA, 47 bp, Artificial Sequence
  Amplification primer (forwards)
ggggacaagtttgtacaaaaaagcaggctctggcggcaagataaaat

SEQ ID NO: 11117 - DNA, 50 bp, Artificial Sequence
  Amplification primer (forwards)
ggggacaagtttgtacaaaaaagcaggctctgatgggttaaagaataatg

SEQ ID NO: 11118 - DNA, 50 bp, Artificial Sequence
  Amplification primer (forwards)
ggggacaagtttgtacaaaaaagcaggctctgatgttgtaattagtggag

SEQ ID NO: 11119 - DNA, 46 bp, Artificial Sequence
  Amplification primer (forwards)
ggggacaagtttgtacaaaaaagcaggcttcgaattaagagaaaga

SEQ ID NO: 11120 - DNA, 49 bp, Artificial Sequence
  Amplification primer (forwards)
ggggacaagtttgtacaaaaaagcaggctctagctttttagtgatttca

SEQ ID NO: 11121 - DNA, 45 bp, Artificial Sequence
  Amplification primer (forwards)
ggggacaagtttgtacaaaaaagcaggctatacgcatagtggaac

SEQ ID NO: 11122 - DNA, 47 bp, Artificial Sequence
  Amplification primer (forwards)
ggggacaagtttgtacaaaaaagcaggctctgttattatcaggggcg

SEQ ID NO: 11123 - DNA, 47 bp, Artificial Sequence
  Amplification primer (forwards)
ggggacaagtttgtacaaaaaagcaggctctgttagtcgttctccga

SEQ ID NO: 11124 - DNA, 48 bp, Artificial Sequence
  Amplification primer (forwards)
ggggacaagtttgtacaaaaaagcaggctctgaggagcaagaattaaa

SEQ ID NO: 11125 - DNA, 49 bp, Artificial Sequence
  Amplification primer (forwards)
ggggacaagtttgtacaaaaaagcaggctctattctaacaaaagcaagt

SEQ ID NO: 11126 - DNA, 47 bp, Artificial Sequence
  Amplification primer (forwards)
ggggacaagtttgtacaaaaaagcaggctctagtgggcgttcatgga

SEQ ID NO: 11127 - DNA, 49 bp, Artificial Sequence
  Amplification primer (forwards)
ggggacaagtttgtacaaaaaagcaggctctgatacccctaatcaacta

SEQ ID NO: 11128 - DNA, 44 bp, Artificial Sequence
  Amplification primer (forwards)
ggggacaagtttgtacaaaaaagcaggctgcaggagctgtccgc

SEQ ID NO: 11129 - DNA, 47 bp, Artificial Sequence
  Amplification primer (forwards)
ggggacaagtttgtacaaaaaagcaggctctgtccgcattggtaaag

SEQ ID NO: 11130 - DNA, 49 bp, Artificial Sequence
  Amplification primer (forwards)
ggggacaagtttgtacaaaaaagcaggctctaactgcttagaaaatgaa

SEQ ID NO: 11131 - DNA, 44 bp, Artificial Sequence
  Amplification primer (forwards)
ggggacaagtttgtacaaaaaagcaggctctaacaactccagca

SEQ ID NO: 11132 - DNA, 47 bp, Artificial Sequence
  Amplification primer (forwards)
ggggacaagtttgtacaaaaaagcaggctctggaaaggtcagtgcag

SEQ ID NO: 11133 - DNA, 50 bp, Artificial Sequence
  Amplification primer (forwards)
ggggacaagtttgtacaaaaaagcaggctctattttattttcagatgaac

SEQ ID NO: 11134 - DNA, 47 bp, Artificial Sequence
  Amplification primer (forwards)
ggggacaagtttgtacaaaaaagcaggctctgcatcagatgttcaga

SEQ ID NO: 11135 - DNA, 48 bp, Artificial Sequence
  Amplification primer (forwards)
ggggacaagtttgtacaaaaaagcaggctctagtgacgttgacaaata

SEQ ID NO: 11136 - DNA, 50 bp, Artificial Sequence
  Amplification primer (forwards)
ggggacaagtttgtacaaaaaagcaggctctatgaccatttacttcaata

SEQ ID NO: 11137 - DNA, 47 bp, Artificial Sequence
  Amplification primer (forwards)
ggggacaagtttgtacaaaaaagcaggctctcaaactattttgacgc

SEQ ID NO: 11138 - DNA, 50 bp, Artificial Sequence
  Amplification primer (forwards)
ggggacaagtttgtacaaaaaagcaggctctgatgaatatctacgtgtcg

SEQ ID NO: 11139 - DNA, 50 bp, Artificial Sequence
  Amplification primer (forwards)
ggggacaagtttgtacaaaaaagcaggctctgatgaggtggactataaca

SEQ ID NO: 11140 - DNA, 50 bp, Artificial Sequence
  Amplification primer (forwards)
ggggacaagtttgtacaaaaaagcaggctctattttcttgctcttagttg

SEQ ID NO: 11141 - DNA, 50 bp, Artificial Sequence
  Amplification primer (forwards)
ggggacaagtttgtacaaaaaagcaggctctgaaactgtcattcaacttg

SEQ ID NO: 11142 - DNA, 48 bp, Artificial Sequence
  Amplification primer (forwards)
ggggacaagtttgtacaaaaaagcaggctattttttaacaacaaaaaa

SEQ ID NO: 11143 - DNA, 48 bp, Artificial Sequence
  Amplification primer (forwards)
ggggacaagtttgtacaaaaaagcaggctctccaatttttattggttt

SEQ ID NO: 11144 - DNA, 48 bp, Artificial Sequence; identical to SEQ ID NO: 10983
  Amplification primer (forwards)

SEQ ID NO: 11145 - DNA, 49 bp, Artificial Sequence
  Amplification primer (forwards)
ggggacaagtttgtacaaaaaagcaggctctacaatttatattgcttgg

SEQ ID NO: 11146 - DNA, 47 bp, Artificial Sequence
  Amplification primer (forwards)
ggggacaagtttgtacaaaaaagcaggctctgttggattgatgttgg

SEQ ID NO: 11147 - DNA, 44 bp, Artificial Sequence
  Amplification primer (forwards)
ggggacaagtttgtacaaaaaagcaggctggaaacaaatcacag

SEQ ID NO: 11148 - DNA, 51 bp, Artificial Sequence
  Amplification primer (forwards)
ggggacaagtttgtacaaaaaagcaggctctgcaatagtttttactttttt

SEQ ID NO: 11149 - DNA, 50 bp, Artificial Sequence
  Amplification primer (forwards)
ggggacaagtttgtacaaaaaagcaggctctggttcttatcatttaacaa

SEQ ID NO: 11150 - DNA, 47 bp, Artificial Sequence
  Amplification primer (forwards)
ggggacaagtttgtacaaaaaagcaggctctgctagacccaaacagt

SEQ ID NO: 11151 - DNA, 48 bp, Artificial Sequence
  Amplification primer (forwards)
ggggacaagtttgtacaaaaaagcaggctacactcatattgttgaaaa

SEQ ID NO: 11152 - DNA, 51 bp, Artificial Sequence
  Amplification primer (forwards)
ggggacaagtttgtacaaaaaagcaggctctaatagtactgagacaagtgc

SEQ ID NO: 11153 - DNA, 48 bp, Artificial Sequence
  Amplification primer (forwards)
ggggacaagtttgtacaaaaaagcaggctctgcttatgtcgtcaattt

SEQ ID NO: 11154 - DNA, 49 bp, Artificial Sequence
  Amplification primer (forwards)
ggggacaagtttgtacaaaaaagcaggctctgaattaccttcgtttatc

SEQ ID NO: 11155 - DNA, 50 bp, Artificial Sequence
  Amplification primer (forwards)
ggggacaagtttgtacaaaaaagcaggctctaaacatccgatacttaatg

SEQ ID NO: 11156 - DNA, 47 bp, Artificial Sequence
  Amplification primer (forwards)
ggggacaagtttgtacaaaaaagcaggctctaattatccttttgcga

SEQ ID NO: 11157 - DNA, 47 bp, Artificial Sequence
  Amplification primer (forwards)
ggggacaagtttgtacaaaaaagcaggctctggactacgcggagtat

SEQ ID NO: 11158 - DNA, 47 bp, Artificial Sequence
  Amplification primer (forwards)
ggggacaagtttgtacaaaaaagcaggctctgctattggagcagctg

SEQ ID NO: 11159 - DNA, 50 bp, Artificial Sequence
  Amplification primer (forwards)
ggggacaagtttgtacaaaaaagcaggctctgataaagaagggatagagg

SEQ ID NO: 11160 - DNA, 50 bp, Artificial Sequence
  Amplification primer (forwards)
ggggacaagtttgtacaaaaaagcaggctctaaagaaaaatcacaaactg

SEQ ID NO: 11161 - DNA, 52 bp, Artificial Sequence
  Amplification primer (forwards)
ggggacaagtttgtacaaaaaagcaggctctcaaaataataaaaaagtaaaa

SEQ ID NO: 11162 - DNA, 52 bp, Artificial Sequence; identical to SEQ ID NO: 11161
  Amplification primer (forwards)

SEQ ID NO: 11163 - DNA, 46 bp, Artificial Sequence
  Amplification primer (forwards)
ggggacaagtttgtacaaaaaagcaggctcaaatggtcaatctagc

SEQ ID NO: 11164 - DNA, 48 bp, Artificial Sequence
  Amplification primer (forwards)
ggggacaagtttgtacaaaaaagcaggctctaaggattcaaaaatccc

SEQ ID NO: 11165 - DNA, 47 bp, Artificial Sequence
  Amplification primer (forwards)
ggggacaagtttgtacaaaaaagcaggctctgggcaaccatctacat

SEQ ID NO: 11166 - DNA, 47 bp, Artificial Sequence
  Amplification primer (forwards)
ggggacaagtttgtacaaaaaagcaggctctcattcacaggatagca

SEQ ID NO: 11167 - DNA, 48 bp, Artificial Sequence
  Amplification primer (forwards)
ggggacaagtttgtacaaaaaagcaggctctggacgaggagaagtatc

SEQ ID NO: 11168 - DNA, 45 bp, Artificial Sequence
  Amplification primer (forwards)
ggggacaagtttgtacaaaaaagcaggctcacaatcttctcaaaa

SEQ ID NO: 11169 - DNA, 48 bp, Artificial Sequence
  Amplification primer (forwards)
ggggacaagtttgtacaaaaaagcaggctctgataagtcagcaaaccc

SEQ ID NO: 11170 - DNA, 49 bp, Artificial Sequence
  Amplification primer (forwards)
ggggacaagtttgtacaaaaaagcaggctctatcacgacattacagact

SEQ ID NO: 11171 - DNA, 49 bp, Artificial Sequence
  Amplification primer (forwards)
ggggacaagtttgtacaaaaaagcaggctctagatatttaactgctggt

SEQ ID NO: 11172 - DNA, 52 bp, Artificial Sequence
  Amplification primer (forwards)
ggggacaagtttgtacaaaaaagcaggctctataaaatatcaagatgatttt

SEQ ID NO: 11173 - DNA, 46 bp, Artificial Sequence
  Amplification primer (forwards)
ggggacaagtttgtacaaaaaagcaggcttagaagtcagagagcag

SEQ ID NO: 11174 - DNA, 47 bp, Artificial Sequence
  Amplification primer (forwards)
ggggacaagtttgtacaaaaaagcaggctctattatggagacgggta

SEQ ID NO: 11175 - DNA, 50 bp, Artificial Sequence
  Amplification primer (forwards)
ggggacaagtttgtacaaaaaagcaggctctttgaataataaaggtgtcg

SEQ ID NO: 11176 - DNA, 50 bp, Artificial Sequence; identical to SEQ ID NO: 11175
  Amplification primer (forwards)

SEQ ID NO: 11177 - DNA, 50 bp, Artificial Sequence
  Amplification primer (forwards)
ggggacaagtttgtacaaaaaagcaggctctatttcctcaaatttttacg

SEQ ID NO: 11178 - DNA, 49 bp, Artificial Sequence
  Amplification primer (forwards)
ggggacaagtttgtacaaaaaagcaggctctaatttttataagctcttg

SEQ ID NO: 11179 - DNA, 47 bp, Artificial Sequence
  Amplification primer (forwards)
ggggacaagtttgtacaaaaaagcaggctctgcgcttaaagaattaa

SEQ ID NO: 11180 - DNA, 47 bp, Artificial Sequence
  Amplification primer (forwards)
ggggacaagtttgtacaaaaaagcaggctttttaaaagaaattgaaa

SEQ ID NO: 11181 - DNA, 48 bp, Artificial Sequence
  Amplification primer (forwards)
ggggacaagtttgtacaaaaaagcaggctttcgtaaatataattttga

SEQ ID NO: 11182 - DNA, 49 bp, Artificial Sequence
  Amplification primer (forwards)
ggggacaagtttgtacaaaaaagcaggctctagcgatacctttaatttt

SEQ ID NO: 11183 - DNA, 47 bp, Artificial Sequence
  Amplification primer (forwards)
ggggacaagtttgtacaaaaaagcaggctctatgctgattaagtcgc

SEQ ID NO: 11184 - DNA, 45 bp, Artificial Sequence
  Amplification primer (forwards)
ggggacaagtttgtacaaaaaagcaggctgtggtaaaactggact

SEQ ID NO: 11185 - DNA, 48 bp, Artificial Sequence
  Amplification primer (forwards)
ggggacaagtttgtacaaaaaagcaggctctaagacaggagcacccgt

SEQ ID NO: 11186 - DNA, 44 bp, Artificial Sequence
  Amplification primer (forwards)
ggggacaagtttgtacaaaaaagcaggctgcgagtcaattgagc

SEQ ID NO: 11187 - DNA, 51 bp, Artificial Sequence
  Amplification primer (forwards)
ggggacaagtttgtacaaaaaagcaggctctacaaatactttgaaaaaaga

SEQ ID NO: 11188 - DNA, 50 bp, Artificial Sequence
  Amplification primer (forwards)
ggggacaagtttgtacaaaaaagcaggctctaatttatttaaacgttcct

SEQ ID NO: 11189 - DNA, 47 bp, Artificial Sequence
  Amplification primer (forwards)
ggggacaagtttgtacaaaaaagcaggctctaaaaagcggctagtca

SEQ ID NO: 11190 - DNA, 49 bp, Artificial Sequence
  Amplification primer (forwards)
ggggacaagtttgtacaaaaaagcaggctctggacaaaaatcaaaaata

SEQ ID NO: 11191 - DNA, 49 bp, Artificial Sequence; identical to SEQ ID NO: 11190
  Amplification primer (forwards)

SEQ ID NO: 11192 - DNA, 48 bp, Artificial Sequence
  Amplification primer (forwards)
ggggacaagtttgtacaaaaaagcaggctctggaggaaaatttcagaa

SEQ ID NO: 11193 - DNA, 50 bp, Artificial Sequence
  Amplification primer (forwards)
ggggacaagtttgtacaaaaaagcaggctctacctcatatccttttattt

SEQ ID NO: 11194 - DNA, 44 bp, Artificial Sequence
  Amplification primer (forwards)
ggggacaagtttgtacaaaaaagcaggctgtggacatcgtggtg

SEQ ID NO: 11195 - DNA, 50 bp, Artificial Sequence
  Amplification primer (forwards)
ggggacaagtttgtacaaaaaagcaggctctaagactaaaaaaatcatca

SEQ ID NO: 11196 - DNA, 49 bp, Artificial Sequence
  Amplification primer (forwards)
ggggacaagtttgtacaaaaaagcaggctctaaacacaccagtaaagaa

SEQ ID NO: 11197 - DNA, 52 bp, Artificial Sequence
  Amplification primer (forwards)
ggggacaagtttgtacaaaaaagcaggctctaaaaataaaaaaatcttattt

SEQ ID NO: 11198 - DNA, 49 bp, Artificial Sequence
  Amplification primer (forwards)
ggggacaagtttgtacaaaaaagcaggcttaataaaaggattattgtca

SEQ ID NO: 11199 - DNA, 48 bp, Artificial Sequence
  Amplification primer (forwards)
ggggacaagtttgtacaaaaaagcaggctctgctcgtttaataccaca

SEQ ID NO: 11200 - DNA, 49 bp, Artificial Sequence
  Amplification primer (forwards)
ggggacaagtttgtacaaaaaagcaggctctaacactaacatccctagc

SEQ ID NO: 11201 - DNA, 49 bp, Artificial Sequence
  Amplification primer (forwards)
ggggacaagtttgtacaaaaaagcaggctctagagggaaggttatttac

SEQ ID NO: 11202 - DNA, 51 bp, Artificial Sequence
  Amplification primer (forwards)
ggggacaagtttgtacaaaaaagcaggctctatcaataaagtaacagctca

SEQ ID NO: 11203 - DNA, 53 bp, Artificial Sequence
  Amplification primer (forwards)
ggggacaagtttgtacaaaaaagcaggctctagaacactatttagaatgatat

SEQ ID NO: 11204 - DNA, 45 bp, Artificial Sequence
  Amplification primer (forwards)
ggggacaagtttgtacaaaaaagcaggctactatgcgaatcacag

SEQ ID NO: 11205 - DNA, 48 bp, Artificial Sequence
  Amplification primer (forwards)
ggggacaagtttgtacaaaaaagcaggctctagtttagcattgcaaat

SEQ ID NO: 11206 - DNA, 50 bp, Artificial Sequence
  Amplification primer (forwards)
ggggacaagtttgtacaaaaaagcaggctctacattttataaaaagacgg

SEQ ID NO: 11207 - DNA, 51 bp, Artificial Sequence
  Amplification primer (forwards)
ggggacaagtttgtacaaaaaagcaggctctaagaaaatacgaagctatac

SEQ ID NO: 11208 - DNA, 49 bp, Artificial Sequence
  Amplification primer (forwards)
ggggacaagtttgtacaaaaaagcaggctctggaggaaatgaaatatta

SEQ ID NO: 11209 - DNA, 51 bp, Artificial Sequence
  Amplification primer (forwards)
ggggacaagtttgtacaaaaaagcaggctctggtatgtctaataaggaaat

SEQ ID NO: 11210 - DNA, 51 bp, Artificial Sequence
  Amplification primer (forwards)
ggggacaagtttgtacaaaaaagcaggctctaacaaacttattacagaaaa

SEQ ID NO: 11211 - DNA, 50 bp, Artificial Sequence
  Amplification primer (forwards)
ggggacaagtttgtacaaaaaagcaggctctgtttcatatgaaaaagtcc

SEQ ID NO: 11212 - DNA, 52 bp, Artificial Sequence
  Amplification primer (forwards)
ggggacaagtttgtacaaaaaagcaggctctagtagaggtatttttttacaa

SEQ ID NO: 11213 - DNA, 47 bp, Artificial Sequence
  Amplification primer (forwards)
ggggacaagtttgtacaaaaaagcaggctctgaacgtcgggtaagtc

SEQ ID NO: 11214 - DNA, 47 bp, Artificial Sequence
  Amplification primer (forwards)
ggggacaagtttgtacaaaaaagcaggctttttaatcgattttattt

SEQ ID NO: 11215 - DNA, 48 bp, Artificial Sequence
  Amplification primer (forwards)
ggggacaagtttgtacaaaaaagcaggctcattaattattcttacggt

SEQ ID NO: 11216 - DNA, 48 bp, Artificial Sequence
  Amplification primer (forwards)
ggggacaagtttgtacaaaaaagcaggctctttatacgttgttaaaca

SEQ ID NO: 11217 - DNA, 46 bp, Artificial Sequence
  Amplification primer (forwards)
ggggacaagtttgtacaaaaaagcaggctggctaagtaagcatgag

SEQ ID NO: 11218 - DNA, 44 bp, Artificial Sequence
  Amplification primer (forwards)
ggggacaagtttgtacaaaaaagcaggcttcccagctagctgtc

SEQ ID NO: 11219 - DNA, 52 bp, Artificial Sequence
  Amplification primer (forwards)
ggggacaagtttgtacaaaaaagcaggctctatagaaattgctgtattaatt

SEQ ID NO: 11220 - DNA, 50 bp, Artificial Sequence
  Amplification primer (forwards)
ggggacaagtttgtacaaaaaagcaggctctattcgatttcttattcttg

SEQ ID NO: 11221 - DNA, 48 bp, Artificial Sequence
  Amplification primer (forwards)
ggggacaagtttgtacaaaaaagcaggctctgactcaaccacagtctc

SEQ ID NO: 11222 - DNA, 48 bp, Artificial Sequence
  Amplification primer (forwards)
ggggacaagtttgtacaaaaaagcaggctctgcagaccttacaagtca

SEQ ID NO: 11223 - DNA, 49 bp, Artificial Sequence
  Amplification primer (forwards)
ggggacaagtttgtacaaaaaagcaggctctattgtatttgctattgca

SEQ ID NO: 11224 - DNA, 51 bp, Artificial Sequence
  Amplification primer (forwards)
ggggacaagtttgtacaaaaaagcaggctctgatattttttcagctattga

SEQ ID NO: 11225 - DNA, 49 bp, Artificial Sequence
  Amplification primer (forwards)
ggggacaagtttgtacaaaaaagcaggctctgttagtgctgctattgaa

SEQ ID NO: 11226 - DNA, 51 bp, Artificial Sequence
  Amplification primer (forwards)
ggggacaagtttgtacaaaaaagcaggctctaagaagcttacttttatttg

SEQ ID NO: 11227 - DNA, 46 bp, Artificial Sequence
  Amplification primer (forwards)
ggggacaagtttgtacaaaaaagcaggctcaaaaggatattcaaga

SEQ ID NO: 11228 - DNA, 54 bp, Artificial Sequence
  Amplification primer (forwards)
ggggacaagtttgtacaaaaaagcaggctctcataatatattaagatttttagg

SEQ ID NO: 11229 - DNA, 48 bp, Artificial Sequence
  Amplification primer (forwards)
ggggacaagtttgtacaaaaaagcaggctctattcttggtcaagatgt

SEQ ID NO: 11230 - DNA, 50 bp, Artificial Sequence
  Amplification primer (forwards)
ggggacaagtttgtacaaaaaagcaggctctcatgaaaatgttaaaaaag

SEQ ID NO: 11231 - DNA, 48 bp, Artificial Sequence
  Amplification primer (forwards)
ggggacaagtttgtacaaaaaagcaggctctaagtcaacggtaacaaa

SEQ ID NO: 11232 - DNA, 44 bp, Artificial Sequence
  Amplification primer (forwards)
ggggacaagtttgtacaaaaaagcaggcaggaaacgtttttcct

SEQ ID NO: 11233 - DNA, 49 bp, Artificial Sequence
  Amplification primer (forwards)
ggggacaagtttgtacaaaaaagcaggctctaaccataagggaaaagta

SEQ ID NO: 11234 - DNA, 49 bp, Artificial Sequence
  Amplification primer (forwards)
ggggacaagtttgtacaaaaaagcaggctctgctaaacaattaattggt

SEQ ID NO: 11235 - DNA, 49 bp, Artificial Sequence
  Amplification primer (forwards)
ggggacaagtttgtacaaaaaagcaggctctttgatggtgttgttattc

SEQ ID NO: 11236 - DNA, 50 bp, Artificial Sequence
  Amplification primer (forwards)
ggggacaagtttgtacaaaaaagcaggctctaaaacttatttgtcaaatg

SEQ ID NO: 11237 - DNA, 44 bp, Artificial Sequence
  Amplification primer (forwards)
ggggacaagtttgtacaaaaaagcaggctgggcttaccatactg

SEQ ID NO: 11238 - DNA, 47 bp, Artificial Sequence
  Amplification primer (forwards)
ggggacaagtttgtacaaaaaagcaggctctggccttaatcttaagc

SEQ ID NO: 11239 - DNA, 50 bp, Artificial Sequence
  Amplification primer (forwards)
ggggacaagtttgtacaaaaaagcaggctctcaatattttttgaaacaag

SEQ ID NO: 11240 - DNA, 48 bp, Artificial Sequence
  Amplification primer (forwards)
ggggacaagtttgtacaaaaaagcaggctttatttcaggttatatcaa

SEQ ID NO: 11241 - DNA, 48 bp, Artificial Sequence
  Amplification primer (forwards)
ggggacaagtttgtacaaaaaagcaggctctgaaaattggaagtttgc

SEQ ID NO: 11242 - DNA, 47 bp, Artificial Sequence
  Amplification primer (forwards)
ggggacaagtttgtacaaaaaagcaggctctattgaaaagggagttg

SEQ ID NO: 11243 - DNA, 50 bp, Artificial Sequence
  Amplification primer (forwards)
ggggacaagtttgtacaaaaaagcaggctctattgttggtagagaaatca

SEQ ID NO: 11244 - DNA, 48 bp, Artificial Sequence
  Amplification primer (forwards)
ggggacaagtttgtacaaaaaagcaggctatcatgtaaaaattgatca

SEQ ID NO: 11245 - DNA, 51 bp, Artificial Sequence
  Amplification primer (forwards)
ggggacaagtttgtacaaaaaagcaggctctgattttttatacaaaggagg

SEQ ID NO: 11246 - DNA, 52 bp, Artificial Sequence
  Amplification primer (forwards)
ggggacaagtttgtacaaaaaagcaggctctgaacgttatacagataaaatg

SEQ ID NO: 11247 - DNA, 49 bp, Artificial Sequence
  Amplification primer (forwards)
ggggacaagtttgtacaaaaaagcaggctctctttctcgtaaaaaagag

SEQ ID NO: 11248 - DNA, 52 bp, Artificial Sequence
  Amplification primer (forwards)
ggggacaagtttgtacaaaaaagcaggctctactcttgtcttagttgtttat

SEQ ID NO: 11249 - DNA, 50 bp, Artificial Sequence
  Amplification primer (forwards)
ggggacaagtttgtacaaaaaagcaggctctataaagaaagctgaaaatc

SEQ ID NO: 11250 - DNA, 51 bp, Artificial Sequence
  Amplification primer (forwards)
ggggacaagtttgtacaaaaaagcaggctctataaaaaatgctatagcata

SEQ ID NO: 11251 - DNA, 50 bp, Artificial Sequence
  Amplification primer (forwards)
ggggacaagtttgtacaaaaaagcaggctctcagccttctaaactacttc

SEQ ID NO: 11252 - DNA, 49 bp, Artificial Sequence
  Amplification primer (forwards)
ggggacaagtttgtacaaaaaagcaggctctgatttgtttagcatgttg

SEQ ID NO: 11253 - DNA, 47 bp, Artificial Sequence
  Amplification primer (forwards)
ggggacaagtttgtacaaaaaagcaggctctcttgcttccctgattt

SEQ ID NO: 11254 - DNA, 50 bp, Artificial Sequence
  Amplification primer (forwards)
ggggacaagtttgtacaaaaaagcaggctctcatcaatcaaatcattatc

SEQ ID NO: 11255 - DNA, 49 bp, Artificial Sequence
  Amplification primer (forwards)
ggggacaagtttgtacaaaaaagcaggctctatctttattatcggacaa

SEQ ID NO: 11256 - DNA, 52 bp, Artificial Sequence
  Amplification primer (forwards)
ggggacaagtttgtacaaaaaagcaggctctaaagaatttattaaagaatgg

SEQ ID NO: 11257 - DNA, 47 bp, Artificial Sequence
  Amplification primer (forwards)
ggggacaagtttgtacaaaaaagcaggctctgcagatgatggtggtt

SEQ ID NO: 11258 - DNA, 47 bp, Artificial Sequence
  Amplification primer (forwards)
ggggacaagtttgtacaaaaaagcaggcttaaatgatgcaataacaa

SEQ ID NO: 11259 - DNA, 44 bp, Artificial Sequence
  Amplification primer (forwards)
ggggacaagtttgtacaaaaaagcaggcttgctggattatcctc

SEQ ID NO: 11260 - DNA, 50 bp, Artificial Sequence
  Amplification primer (forwards)
ggggacaagtttgtacaaaaaagcaggctctgtatttatggcaaataaga

SEQ ID NO: 11261 - DNA, 49 bp, Artificial Sequence
  Amplification primer (forwards)
ggggacaagtttgtacaaaaaagcaggctctatgagttctctggaagtt

SEQ ID NO: 11262 - DNA, 47 bp, Artificial Sequence
  Amplification primer (forwards)
ggggacaagtttgtacaaaaaagcaggctctggtgtcctcaactctg

SEQ ID NO: 11263 - DNA, 48 bp, Artificial Sequence
  Amplification primer (forwards)
ggggacaagtttgtacaaaaaagcaggctctgttcatgattttggtga

SEQ ID NO: 11264 - DNA, 47 bp, Artificial Sequence
  Amplification primer (forwards)
ggggacaagtttgtacaaaaaagcaggctctggggtttggttttata

SEQ ID NO: 11265 - DNA, 49 bp, Artificial Sequence
  Amplification primer (forwards)
ggggacaagtttgtacaaaaaagcaggctctcaatcagacattaaagca

SEQ ID NO: 11266 - DNA, 47 bp, Artificial Sequence
  Amplification primer (forwards)
ggggacaagtttgtacaaaaaagcaggctctatttggaggggggaaa

SEQ ID NO: 11267 - DNA, 47 bp, Artificial Sequence
  Amplification primer (forwards)
ggggacaagtttgtacaaaaaagcaggctctaccaaatttgactggg

SEQ ID NO: 11268 - DNA, 47 bp, Amplification primer (forwards)
ggggacaagtttgtacaaaaaagcaggctctgttacgtttttcttat

SEQ ID NO: 11269 - DNA, 52 bp, Artificial Sequence
  Amplification primer (forwards)
ggggacaagtttgtacaaaaaagcaggctctaaaaagaaaagtttaattagc

SEQ ID NO: 11270 - DNA, 47 bp, Artificial Sequence
  Amplification primer (forwards)
ggggacaagtttgtacaaaaaagcaggctttgatttttttaagaaaa

SEQ ID NO: 11271 - DNA, 53 bp, Artificial Sequence
  Amplification primer (forwards)
ggggacaagtttgtacaaaaaagcaggctctaagaaattaattataggtattt

SEQ ID NO: 11272 - DNA, 47 bp, Artificial Sequence
  Amplification primer (forwards)
ggggacaagtttgtacaaaaaagcaggctctggtttttcgtttttga

SEQ ID NO: 11273 - DNA, 50 bp, Artificial Sequence
  Amplification primer (forwards)
ggggacaagtttgtacaaaaaagcaggctctctattctcagatgaaacaa

SEQ ID NO: 11274 - DNA, 52 bp, Artificial Sequence
  Amplification primer (forwards)
ggggacaagtttgtacaaaaaagcaggctctgttaaattaaaatcgttactg

SEQ ID NO: 11275 - DNA, 47 bp, Artificial Sequence
  Amplification primer (forwards)
ggggacaagtttgtacaaaaaagcaggctctatgcaacgattaggac

SEQ ID NO: 11276 - DNA, 45 bp, Artificial Sequence
  Amplification primer (forwards)
ggggacaagtttgtacaaaaaagcaggcttaggtgaaagcaaatc

SEQ ID NO: 11277 - DNA, 50 bp, Artificial Sequence
  Amplification primer (forwards)
ggggacaagtttgtacaaaaaagcaggctctggaggattttatatgaaag

SEQ ID NO: 11278 - DNA, 49 bp, Artificial Sequence
  Amplification primer (forwards)
ggggacaagtttgtacaaaaaagcaggctctgcacacacacctactagt

SEQ ID NO: 11279 - DNA, 47 bp, Artificial Sequence
  Amplification primer (forwards)
ggggacaagtttgtacaaaaaagcaggctctaacaatcgttcaaagc

SEQ ID NO: 11280 - DNA, 51 bp, Artificial Sequence
  Amplification primer (forwards)
ggggacaagtttgtacaaaaaagcaggctctaaaaagtttttaaaagtttt

SEQ ID NO: 11281 - DNA, 46 bp, Artificial Sequence
  Amplification primer (forwards)
ggggacaagtttgtacaaaaaagcaggctggaataatcatcagtca

SEQ ID NO: 11282 - DNA, 47 bp, Artificial Sequence
  Amplification primer (forwards)
ggggacaagtttgtacaaaaaagcaggctctcaatctaaagggcaaa

SEQ ID NO: 11283 - DNA, 47 bp, Artificial Sequence; identical to SEQ ID NO: 11282
  Amplification primer (forwards)

SEQ ID NO: 11284 - DNA, 50 bp, Artificial Sequence
  Amplification primer (forwards)
ggggacaagtttgtacaaaaaagcaggctattacttatcaaaagaaaagg

SEQ ID NO: 11285 - DNA, 51 bp, Artificial Sequence
  Amplification primer (forwards)
ggggacaagtttgtacaaaaaagcaggctctcaagtattaaatgacaatgg

SEQ ID NO: 11286 - DNA, 46 bp, Artificial Sequence
  Amplification primer (forwards)
ggggacaagtttgtacaaaaaagcaggcttgaatcgtaaaaaaagg

SEQ ID NO: 11287 - DNA, 47 bp, Artificial Sequence
  Amplification primer (forwards)
ggggacaagtttgtacaaaaaagcaggctctatgggtctagcaacaa

SEQ ID NO: 11288 - DNA, 47 bp, Artificial Sequence; identical to SEQ ID NO: 11287
  Amplification primer (forwards)

SEQ ID NO: 11289 - DNA, 48 bp, Artificial Sequence
  Amplification primer (forwards)
ggggacaagtttgtacaaaaaagcaggctctgttacagctaaacacgg

SEQ ID NO: 11290 - DNA, 49 bp, Artificial Sequence
  Amplification primer (forwards)
ggggacaagtttgtacaaaaaagcaggctctggtcattttagtgaaaaa

SEQ ID NO: 11291 - DNA, 48 bp, Artificial Sequence
  Amplification primer (forwards)
ggggacaagtttgtacaaaaaagcaggctctagcgacataaaaatcat

SEQ ID NO: 11292 - DNA, 49 bp, Artificial Sequence
  Amplification primer (forwards)
ggggacaagtttgtacaaaaaagcaggctctaaaggtattattttagcg

SEQ ID NO: 11293 - DNA, 48 bp, Artificial Sequence
  Amplification primer (forwards)
ggggacaagtttgtacaaaaaagcaggctctattcagattggcaaatt

SEQ ID NO: 11294 - DNA, 52 bp, Artificial Sequence
  Amplification primer (forwards)
ggggacaagtttgtacaaaaaagcaggctctactaaatttattgttgattca

SEQ ID NO: 11295 - DNA, 47 bp, Artificial Sequence
  Amplification primer (forwards)
ggggacaagtttgtacaaaaaagcaggctttgaaatacttaaacctg

SEQ ID NO: 11296 - DNA, 51 bp, Artificial Sequence
  Amplification primer (forwards)
ggggacaagtttgtacaaaaaagcaggctctgcttctacaaataatgtttc

SEQ ID NO: 11297 - DNA, 51 bp, Artificial Sequence
  Amplification primer (forwards)
ggggacaagtttgtacaaaaaagcaggctctgtaattaatattgagcaagc

SEQ ID NO: 11298 - DNA, 50 bp, Artificial Sequence
  Amplification primer (forwards)
ggggacaagtttgtacaaaaaagcaggctctgaaatcaacactgaaatag

SEQ ID NO: 11299 - DNA, 51 bp, Artificial Sequence
  Amplification primer (forwards)
ggggacaagtttgtacaaaaaagcaggctctacaaggcatataaaaatttc

SEQ ID NO: 11300 - DNA, 48 bp, Artificial Sequence
  Amplification primer (forwards)
ggggacaagtttgtacaaaaaagcaggctctaacgaaatcaaatgccc

SEQ ID NO: 11301 - DNA, 49 bp, Artificial Sequence
  Amplification primer (forwards)
ggggacaagtttgtacaaaaaagcaggctctggacgagtaatgaaaaca

SEQ ID NO: 11302 - DNA, 48 bp, Artificial Sequence
  Amplification primer (forwards)
ggggacaagtttgtacaaaaaagcaggctctgggaaaaaaattgtttt

SEQ ID NO: 11303 - DNA, 53 bp, Artificial Sequence
  Amplification primer (forwards)
ggggacaagtttgtacaaaaaagcaggctctaaatttacagaacttaacttat

SEQ ID NO: 11304 - DNA, 47 bp, Artificial Sequence
  Amplification primer (forwards)
ggggacaagtttgtacaaaaaagcaggcatgacacagatgaatttta

SEQ ID NO: 11305 - DNA, 44 bp, Artificial Sequence
  Amplification primer (forwards)
ggggacaagtttgtacaaaaaagcaggcttgcaacttggaattg

SEQ ID NO: 11306 - DNA, 49 bp, Artificial Sequence
  Amplification primer (forwards)
ggggacaagtttgtacaaaaaagcaggctctgctaaagagagggtagat

SEQ ID NO: 11307 - DNA, 49 bp, Artificial Sequence
  Amplification primer (forwards)
ggggacaagtttgtacaaaaaagcaggctcaattattactgatgtttac

SEQ ID NO: 11308 - DNA, 49 bp, Artificial Sequence
  Amplification primer (forwards)
ggggacaagtttgtacaaaaaagcaggctctactgcaactaaacaacat

SEQ ID NO: 11309 - DNA, 49 bp, Artificial Sequence
  Amplification primer (forwards)
ggggacaagtttgtacaaaaaagcaggctctaaacgtattgctgtttta

SEQ ID NO: 11310 - DNA, 52 bp, Artificial Sequence
  Amplification primer (forwards)
ggggacaagtttgtacaaaaaagcaggctctaaattttatcttgttagacac

SEQ ID NO: 11311 - DNA, 50 bp, Artificial Sequence
  Amplification primer (forwards)
ggggacaagtttgtacaaaaaagcaggctctataggggattattcagtaa

SEQ ID NO: 11312 - DNA, 48 bp, Artificial Sequence
  Amplification primer (forwards)
ggggacaagtttgtacaaaaaagcaggctctactgaacgaacattcga

SEQ ID NO: 11313 - DNA, 50 bp, Artificial Sequence
  Amplification primer (forwards)
ggggacaagtttgtacaaaaaagcaggctctaataagccatattcaatag

SEQ ID NO: 11314 - DNA, 50 bp, Artificial Sequence; identical to SEQ ID NO: 11313
  Amplification primer (forwards)

SEQ ID NO: 11315 - DNA, 48 bp, Artificial Sequence
  Amplification primer (forwards)
ggggacaagtttgtacaaaaaagcaggctctgacttgaatggcaatat

SEQ ID NO: 11316 - DNA, 53 bp, Artificial Sequence
  Amplification primer (forwards)
ggggacaagtttgtacaaaaaagcaggctctattgattttattatttctattg

SEQ ID NO: 11317 - DNA, 48 bp, Artificial Sequence
  Amplification primer (forwards)
ggggacaagtttgtacaaaaaagcaggcttaaaacattttggtagtaa

SEQ ID NO: 11318 - DNA, 50 bp, Artificial Sequence
  Amplification primer (forwards)
ggggacaagtttgtacaaaaaagcaggctctactatttatgaccaaattg

SEQ ID NO: 11319 - DNA, 51 bp, Artificial Sequence
  Amplification primer (forwards)
ggggacaagtttgtacaaaaaagcaggctctaaaaataaaaaagatcagtt

SEQ ID NO: 11320 - DNA, 49 bp, Artificial Sequence
  Amplification primer (forwards)
ggggacaagtttgtacaaaaaagcaggctctcaagaaacagatacgacg

SEQ ID NO: 11321 - DNA, 49 bp, Artificial Sequence
  Amplification primer (forwards)
ggggacaagtttgtacaaaaaagcaggctctggtaatgagtcaaagaac

SEQ ID NO: 11322 - DNA, 48 bp, Artificial Sequence
  Amplification primer (forwards)
ggggacaagtttgtacaaaaaagcaggctctggaagtaaatcagcttc

SEQ ID NO: 11323 - DNA, 47 bp, Artificial Sequence
  Amplification primer (forwards)
ggggacaagtttgtacaaaaaagcaggctctgcttggcaacttgttc

SEQ ID NO: 11324 - DNA, 48 bp, Artificial Sequence
  Amplification primer (forwards)
ggggacaagtttgtacaaaaaagcaggctctggcatctcagacttacc

SEQ ID NO: 11325 - DNA, 47 bp, Artificial Sequence
  Amplification primer (forwards)
ggggacaagtttgtacaaaaaagcaggctctaaattcaaatctgggg

SEQ ID NO: 11326 - DNA, 47 bp, Artificial Sequence; identical to SEQ ID NO: 11325
  Amplification primer (forwards)

SEQ ID NO: 11327 - DNA, 47 bp, Artificial Sequence
  Amplification primer (forwards)
ggggacaagtttgtacaaaaaagcaggctctggagggaaaatgaatc

SEQ ID NO: 11328 - DNA, 47 bp, Artificial Sequence; identical to SEQ ID NO: 11327
  Amplification primer (forwards)

SEQ ID NO: 11329 - DNA, 47 bp, Artificial Sequence
  Amplification primer (forwards)
ggggacaagtttgtacaaaaaagcaggctctggcaacttcaaagcat

SEQ ID NO: 11330 - DNA, 47 bp, Artificial Sequence
  Amplification primer (forwards)
ggggacaagtttgtacaaaaaagcaggctctgaccaagtcggtgtcc

SEQ ID NO: 11331 - DNA, 50 bp, Artificial Sequence
  Amplification primer (forwards)
ggggacaagtttgtacaaaaaagcaggctctaaatcaaagacctcttcta

SEQ ID NO: 11332 - DNA, 49 bp, Artificial Sequence
  Amplification primer (forwards)
ggggacaagtttgtacaaaaaagcaggctctaataaacgcgtaaaaatc

SEQ ID NO: 11333 - DNA, 48 bp, Artificial Sequence
  Amplification primer (forwards)
ggggacaagtttgtacaaaaaagcaggctctaccagaacagtagcaat

SEQ ID NO: 11334 - DNA, 50 bp, Artificial Sequence
  Amplification primer (forwards)
ggggacaagtttgtacaaaaaagcaggctctacaaaaaacctgttattaa

SEQ ID NO: 11335 - DNA, 52 bp, Artificial Sequence
  Amplification primer (forwards)
ggggacaagtttgtacaaaaaagcaggctctattgatatacaaaaaataaaa

SEQ ID NO: 11336 - DNA, 47 bp, Artificial Sequence
  Amplification primer (forwards)
ggggacaagtttgtacaaaaaagcaggctctggatcattgagggcaa

SEQ ID NO: 11337 - DNA, 53 bp, Artificial Sequence
  Amplification primer (forwards)
ggggacaagtttgtacaaaaaagcaggctctaatttagtaaaagtgaatagtg

SEQ ID NO: 11338 - DNA, 51 bp, Artificial Sequence
  Amplification primer (forwards)
ggggacaagtttgtacaaaaaagcaggctctgaagaagaaaaatattttga

SEQ ID NO: 11339 - DNA, 49 bp, Artificial Sequence
  Amplification primer (forwards)
ggggacaagtttgtacaaaaaagcaggctctcaggttgaagttgactta

SEQ ID NO: 11340 - DNA, 49 bp, Artificial Sequence
  Amplification primer (forwards)
ggggacaagtttgtacaaaaaagcaggctctgaaacagattcgtttgta

SEQ ID NO: 11341 - DNA, 49 bp, Artificial Sequence
  Amplification primer (forwards)
ggggacaagtttgtacaaaaaagcaggctctgctataatagacaaaaag

SEQ ID NO: 11342 - DNA, 45 bp, Artificial Sequence
  Amplification primer (forwards)
ggggacaagtttgtacaaaaaagcaggctcgaaaccgattaagat

SEQ ID NO: 11343 - DNA, 47 bp, Artificial Sequence
  Amplification primer (forwards)
ggggacaagtttgtacaaaaaagcaggctctcaagtcatgcgctatg

SEQ ID NO: 11344 - DNA, 52 bp, Artificial Sequence
  Amplification primer (forwards)
ggggacaagtttgtacaaaaaagcaggctctggatttctctataattacttc

SEQ ID NO: 11345 - DNA, 48 bp, Artificial Sequence
  Amplification primer (forwards)
ggggacaagtttgtacaaaaaagcaggctctggaaaaccattgttaac

SEQ ID NO: 11346 - DNA, 49 bp, Artificial Sequence
  Amplification primer (forwards)
ggggacaagtttgtacaaaaaagcaggctctcagaaaattgaaggtatt

SEQ ID NO: 11347 - DNA, 47 bp, Artificial Sequence
  Amplification primer (forwards)
ggggacaagtttgtacaaaaaagcaggctctgaaatgcaagttcaaa

SEQ ID NO: 11348 - DNA, 47 bp, Artificial Sequence
  Amplification primer (forwards)
ggggacaagtttgtacaaaaaagcaggctctgcacaacgcagaatgt

SEQ ID NO: 11349 - DNA, 47 bp, Artificial Sequence
  Amplification primer (forwards)
ggggacaagtttgtacaaaaaagcaggctctaaaaacctgaattggg

SEQ ID NO: 11350 - DNA, 53 bp, Artificial Sequence
  Amplification primer (forwards)
ggggacaagtttgtacaaaaaagcaggctctaataaaatagctaatacagaag

SEQ ID NO: 11351 - DNA, 52 bp, Artificial Sequence
  Amplification primer (forwards)
ggggacaagtttgtacaaaaaagcaggctctattgatattcattctcatatc

SEQ ID NO: 11352 - DNA, 51 bp, Artificial Sequence
  Amplification primer (forwards)
ggggacaagtttgtacaaaaaagcaggctctactggatctaaaaaattagc

SEQ ID NO: 11353 - DNA, 52 bp, Artificial Sequence
  Amplification primer (forwards)
ggggacaagtttgtacaaaaaagcaggctctaaagatcgcttatataataaa

SEQ ID NO: 11354 - DNA, 52 bp, Artificial Sequence
  Amplification primer (forwards)
ggggacaagtttgtacaaaaaagcaggctctgcaaaagatataattaaggtt

SEQ ID NO: 11355 - DNA, 45 bp, Artificial Sequence
  Amplification primer (forwards)
ggggacaagtttgtacaaaaaagcaggctcagaagatcaaaaaca

SEQ ID NO: 11356 - DNA, 51 bp, Artificial Sequence
  Amplification primer (forwards)
ggggacaagtttgtacaaaaaagcaggctctactttttttaaaaagctaaa

SEQ ID NO: 11357 - DNA, 51 bp, Artificial Sequence
  Amplification primer (forwards)
ggggacaagtttgtacaaaaaagcaggctctggtacagatagtaaatttgg

SEQ ID NO: 11358 - DNA, 50 bp, Artificial Sequence
  Amplification primer (forwards)
ggggacaagtttgtacaaaaaagcaggctctacaatgttaaaaattgaaa

SEQ ID NO: 11359 - DNA, 52 bp, Artificial Sequence
  Amplification primer (forwards)
ggggacaagtttgtacaaaaaagcaggctctattaaagaactaaaagaattt

SEQ ID NO: 11360 - DNA, 44 bp, Artificial Sequence
  Amplification primer (forwards)
ggggacaagtttgtacaaaaaagcaggctctcgctcactacctt

SEQ ID NO: 11361 - DNA, 53 bp, Artificial Sequence
  Amplification primer (forwards)
ggggacaagtttgtacaaaaaagcaggctctaaattctatattattgatgatg

SEQ ID NO: 11362 - DNA, 48 bp, Artificial Sequence
  Amplification primer (forwards)
ggggacaagtttgtacaaaaaagcaggcttggaacatttttatattat

SEQ ID NO: 11363 - DNA, 47 bp, Artificial Sequence
  Amplification primer (forwards)
ggggacaagtttgtacaaaaaagcaggcttttatacaattgaagagc

SEQ ID NO: 11364 - DNA, 46 bp, Artificial Sequence
  Amplification primer (forwards)
ggggacaagtttgtacaaaaaagcaggctcaagaaataattacggt

SEQ ID NO: 11365 - DNA, 47 bp, Artificial Sequence
  Amplification primer (forwards)
ggggacaagtttgtacaaaaaagcaggctctataatgaaggcggtct

SEQ ID NO: 11366 - DNA, 49 bp, Artificial Sequence
  Amplification primer (forwards)
ggggacaagtttgtacaaaaaagcaggctctagcgtatatgttagtgga

SEQ ID NO: 11367 - DNA, 47 bp, Artificial Sequence
  Amplification primer (forwards)
ggggacaagtttgtacaaaaaagcaggctctactaaaccacaggggg

SEQ ID NO: 11368 - DNA, 47 bp, Amplification primer (forwards); identical to SEQ ID NO: 11367

SEQ ID NO: 11369 - DNA, 51 bp, Artificial Sequence
  Amplification primer (forwards)
ggggacaagtttgtacaaaaaagcaggctctggtaatgaaggaaatatcac

SEQ ID NO: 11370 - DNA, 50 bp, Artificial Sequence
  Amplification primer (forwards)
ggggacaagtttgtacaaaaaagcaggctctctcgaattaaaaaatattg

SEQ ID NO: 11371 - DNA, 49 bp, Artificial Sequence
  Amplification primer (forwards)
ggggacaagtttgtacaaaaaagcaggctctaactatatgggtatgggc

SEQ ID NO: 11372 - DNA, 52 bp, Artificial Sequence
  Amplification primer (forwards)
ggggacaagtttgtacaaaaaagcaggctctggaactgctacatatagtagg

SEQ ID NO: 11373 - DNA, 45 bp, Artificial Sequence
  Amplification primer (forwards)
ggggacaagtttgtacaaaaaagcaggctggcttgacattatttt

SEQ ID NO: 11374 - DNA, 51 bp, Artificial Sequence
  Amplification primer (forwards)
ggggacaagtttgtacaaaaaagcaggctctaagaaattaaaaatattccc

SEQ ID NO: 11375 - DNA, 49 bp, Artificial Sequence
  Amplification primer (forwards)
ggggacaagtttgtacaaaaaagcaggctctaaaatcattattcaacgt

SEQ ID NO: 11376 - DNA, 48 bp, Artificial Sequence
  Amplification primer (forwards)
ggggacaagtttgtacaaaaaagcaggctctagtagaatgattccagg

SEQ ID NO: 11377 - DNA, 47 bp, Artificial Sequence
  Amplification primer (forwards)
ggggacaagtttgtacaaaaaagcaggctctaccgaatttaatgacg

SEQ ID NO: 11378 - DNA, 53 bp, Artificial Sequence
  Amplification primer (forwards)
ggggacaagtttgtacaaaaaagcaggctctaaagatagatatattttagcag

SEQ ID NO: 11379 - DNA, 46 bp, Artificial Sequence
  Amplification primer (forwards)
ggggacaagtttgtacaaaaaagcaggctcagaaaaatattccact

SEQ ID NO: 11380 - DNA, 47 bp, Artificial Sequence
  Amplification primer (forwards)
ggggacaagtttgtacaaaaaagcaggctctgaaattggtcagcaaa

SEQ ID NO: 11381 - DNA, 53 bp, Artificial Sequence
  Amplification primer (forwards)
ggggacaagtttgtacaaaaaagcaggctctaagttcgaaaatataatatatg

SEQ ID NO: 11382 - DNA, 52 bp, Artificial Sequence
  Amplification primer (forwards)
ggggacaagtttgtacaaaaaagcaggctctgaaaaagaaactattttaagt

SEQ ID NO: 11383 - DNA, 50 bp, Artificial Sequence
  Amplification primer (forwards)
ggggacaagtttgtacaaaaaagcaggctctaaagaaaagaaaaatttgg

SEQ ID NO: 11384 - DNA, 51 bp, Artificial Sequence
  Amplification primer (forwards)
ggggacaagtttgtacaaaaaagcaggctctggtaataaactgatgtatca

SEQ ID NO: 11385 - DNA, 52 bp, Artificial Sequence
  Amplification primer (forwards)
ggggacaagtttgtacaaaaaagcaggctctgaagatcaactcactatattt

SEQ ID NO: 11386 - DNA, 47 bp, Artificial Sequence
  Amplification primer (forwards)
ggggacaagtttgtacaaaaaagcaggctctcaaattacccgagaag

SEQ ID NO: 11387 - DNA, 53 bp, Artificial Sequence
  Amplification primer (forwards)
ggggacaagtttgtacaaaaaagcaggctctcttaaaagattacttactgaag

SEQ ID NO: 11388 - DNA, 47 bp, Artificial Sequence
  Amplification primer (forwards)
ggggacaagtttgtacaaaaaagcaggctctcttgggatagctcaca

SEQ ID NO: 11389 - DNA, 54 bp, Artificial Sequence
  Amplification primer (forwards)
ggggacaagtttgtacaaaaaagcaggctctataaagtttaaattattttttaa

SEQ ID NO: 11390 - DNA, 53 bp, Artificial Sequence
  Amplification primer (forwards)
ggggacaagtttgtacaaaaaagcaggctctattttacagacgaatatactat

SEQ ID NO: 11391 - DNA, 48 bp, Artificial Sequence
  Amplification primer (forwards)
ggggacaagtttgtacaaaaaagcaggctctagaataattgttgtcgg

SEQ ID NO: 11392 - DNA, 46 bp, Artificial Sequence
  Amplification primer (forwards)
ggggacaagtttgtacaaaaaagcaggctctaatgtaaaaaaacgc

SEQ ID NO: 11393 - DNA, 51 bp, Artificial Sequence
  Amplification primer (forwards)
ggggacaagtttgtacaaaaaagcaggctctctagtatcaaaggagaaagc

SEQ ID NO: 11394 - DNA, 46 bp, Artificial Sequence
  Amplification primer (forwards)
ggggacaagtttgtacaaaaaagcaggctctggtatgttgttagca

SEQ ID NO: 11395 - DNA, 53 bp, Artificial Sequence
  Amplification primer (forwards)
ggggacaagtttgtacaaaaaagcaggctctcttatgataataaattcattcg

SEQ ID NO: 11396 - DNA, 52 bp, Artificial Sequence
  Amplification primer (forwards)
ggggacaagtttgtacaaaaaagcaggctctatgaatagtgaacataaaatt

SEQ ID NO: 11397 - DNA, 47 bp, Artificial Sequence
  Amplification primer (forwards)
ggggacaagtttgtacaaaaaagcaggctctagggaaacttactgga

SEQ ID NO: 11398 - DNA, 50 bp, Artificial Sequence
  Amplification primer (forwards)
ggggacaagtttgtacaaaaaagcaggctctaaaaaagtcatcgatttaa

SEQ ID NO: 11399 - DNA, 51 bp, Artificial Sequence
  Amplification primer (forwards)
ggggacaagtttgtacaaaaaagcaggctctattacatatgatttcacaag

SEQ ID NO: 11400 - DNA, 50 bp, Artificial Sequence
  Amplification primer (forwards)
ggggacaagtttgtacaaaaaagcaggctctaataaatcttggttgagaa

SEQ ID NO: 11401 - DNA, 48 bp, Artificial Sequence
  Amplification primer (forwards)
ggggacaagtttgtacaaaaaagcaggctctcctatgttgtctgttgg

SEQ ID NO: 11402 - DNA, 50 bp, Artificial Sequence
  Amplification primer (forwards)
ggggacaagtttgtacaaaaaagcaggctctacttatcaaaaaacagttg

SEQ ID NO: 11403 - DNA, 44 bp, Artificial Sequence
  Amplification primer (forwards)
ggggacaagtttgtacaaaaaagcaggctttgtcaaagggattt

SEQ ID NO: 11404 - DNA, 54 bp, Artificial Sequence
  Amplification primer (forwards)
ggggacaagtttgtacaaaaaagcaggctctaaattatttgataagtttataga

SEQ ID NO: 11405 - DNA, 48 bp, Artificial Sequence
  Amplification primer (forwards)
ggggacaagtttgtacaaaaaagcaggctctaaaactgctacagttag

SEQ ID NO: 11406 - DNA, 50 bp, Artificial Sequence
  Amplification primer (forwards)
ggggacaagtttgtacaaaaaagcaggctatttagaacaattaaaagagg

SEQ ID NO: 11407 - DNA, 52 bp, Artificial Sequence
  Amplification primer (forwards)
ggggacaagtttgtacaaaaaagcaggctctaaagttttagtagttgatgat

SEQ ID NO: 11408 - DNA, 47 bp, Artificial Sequence
  Amplification primer (forwards)
ggggacaagtttgtacaaaaaagcaggctctaaaatagttgaaggcg

SEQ ID NO: 11409 - DNA, 50 bp, Artificial Sequence
  Amplification primer (forwards)
ggggacaagtttgtacaaaaaagcaggctctggaattgaatttaaaaatg

SEQ ID NO: 11410 - DNA, 50 bp, Artificial Sequence
  Amplification primer (forwards)
ggggacaagtttgtacaaaaaagcaggctctggaaaatattttggtacag

SEQ ID NO: 11411 - DNA, 50 bp, Artificial Sequence
  Amplification primer (forwards)
ggggacaagtttgtacaaaaaagcaggctctgaggttagaatggtaactc

SEQ ID NO: 11412 - DNA, 51 bp, Artificial Sequence
  Amplification primer (forwards)
ggggacaagtttgtacaaaaaagcaggctctaaaatagatgacctaagaaa

SEQ ID NO: 11413 - DNA, 48 bp, Artificial Sequence
  Amplification primer (forwards)
ggggacaagtttgtacaaaaaagcaggcttgaaaattcagtattatca

SEQ ID NO: 11414 - DNA, 53 bp, Artificial Sequence
  Amplification primer (forwards)
ggggacaagtttgtacaaaaaagcaggctctgataaaaataatttagaagact

SEQ ID NO: 11415 - DNA, 48 bp, Artificial Sequence
  Amplification primer (forwards)
ggggacaagtttgtacaaaaaagcaggctctaaaattgacatgaggaa

SEQ ID NO: 11416 - DNA, 48 bp, Artificial Sequence; identical to SEQ ID NO: 11415
  Amplification primer (forwards)

SEQ ID NO: 11417 - DNA, 50 bp, Artificial Sequence
  Amplification primer (forwards)
ggggacaagtttgtacaaaaaagcaggctctaaccacttacttaacctca

SEQ ID NO: 11418 - DNA, 52 bp, Artificial Sequence
  Amplification primer (forwards)
ggggacaagtttgtacaaaaaagcaggctctaaggtagtagtagctattgat

SEQ ID NO: 11419 - DNA, 49 bp, Artificial Sequence
  Amplification primer (forwards)
ggggacaagtttgtacaaaaaagcaggctctactgaagagagaaatcct

SEQ ID NO: 11420 - DNA, 52 bp, Artificial Sequence
  Amplification primer (forwards)
ggggacaagtttgtacaaaaaagcaggctctgctttattatcagttattgtc

SEQ ID NO: 11421 - DNA, 54 bp, Artificial Sequence
  Amplification primer (forwards)
ggggacaagtttgtacaaaaaagcaggctctaaagactatattaacagaatatt

SEQ ID NO: 11422 - DNA, 47 bp, Artificial Sequence
  Amplification primer (forwards)
ggggacaagtttgtacaaaaaagcaggctctggattttttgcacagc

SEQ ID NO: 11423 - DNA, 48 bp, Artificial Sequence
  Amplification primer (forwards)
ggggacaagtttgtacaaaaaagcaggctctattgttggtgaacaaga

SEQ ID NO: 11424 - DNA, 47 bp, Artificial Sequence
  Amplification primer (forwards)
ggggacaagtttgtacaaaaaagcaggcttaaatcaatattttctgc

SEQ ID NO: 11425 - DNA, 47 bp, Artificial Sequence
  Amplification primer (forwards)
ggggacaagtttgtacaaaaaagcaggctctgagcgaattcctgttc

SEQ ID NO: 11426 - DNA, 48 bp, Artificial Sequence
  Amplification primer (forwards)
ggggacaagtttgtacaaaaaagcaggctctgaagtcattcgtgaaca

SEQ ID NO: 11427 - DNA, 49 bp, Artificial Sequence
  Amplification primer (forwards)
ggggacaagtttgtacaaaaaagcaggctcaaaacaatatgattatatc

SEQ ID NO: 11428 - DNA, 47 bp, Artificial Sequence
  Amplification primer (forwards)
ggggacaagtttgtacaaaaaagcaggctctagcaagcctaatgttg

SEQ ID NO: 11429 - DNA, 51 bp, Artificial Sequence
  Amplification primer (forwards)
ggggacaagtttgtacaaaaaagcaggctctgatttaaataattacatcgc

SEQ ID NO: 11430 - DNA, 50 bp, Artificial Sequence
  Amplification primer (forwards)
ggggacaagtttgtacaaaaaagcaggctctaaacgtgaattactactcg

SEQ ID NO: 11431 - DNA, 48 bp, Artificial Sequence
  Amplification primer (forwards)
ggggacaagtttgtacaaaaaagcaggctctatacgccagtttttaag

SEQ ID NO: 11432 - DNA, 44 bp, Artificial Sequence
  Amplification primer (forwards)
ggggacaagtttgtacaaaaaagcaggcttttcgagcgattttg

SEQ ID NO: 11433 - DNA, 49 bp, Artificial Sequence
  Amplification primer (forwards)
ggggacaagtttgtacaaaaaagcaggctctgtaaccaaagttgaagag

SEQ ID NO: 11434 - DNA, 51 bp, Artificial Sequence
  Amplification primer (forwards)
ggggacaagtttgtacaaaaaagcaggctctatgaaagattttattgaatg

SEQ ID NO: 11435 - DNA, 51 bp, Artificial Sequence; identical to SEQ ID NO: 11434
  Amplification primer (forwards)

SEQ ID NO: 11436 - DNA, 52 bp, Artificial Sequence
  Amplification primer (forwards)
ggggacaagtttgtacaaaaaagcaggctctatagcctttaatagtttattt

SEQ ID NO: 11437 - DNA, 54 bp, Artificial Sequence
  Amplification primer (forwards)
ggggacaagtttgtacaaaaaagcaggctctdacagtttataatataaaccatg

SEQ ID NO: 11438 - DNA, 48 bp, Artificial Sequence
  Amplification primer (forwards)
ggggacaagtttgtacaaaaaagcaggctattcttttgaagaactttt

SEQ ID NO: 11439 - DNA, 48 bp, Artificial Sequence
  Amplification primer (forwards)
ggggacaagtttgtacaaaaaagcaggctctataaaaattttgatccc

SEQ ID NO: 11440 - DNA, 48 bp, Artificial Sequence
  Amplification primer (forwards)
ggggacaagtttgtacaaaaaagcaggctctaatcattccattgaatc

SEQ ID NO: 11441 - DNA, 46 bp, Artificial Sequence
  Amplification primer (forwards)
ggggacaagtttgtacaaaaaagcaggcttacaaaaaaaatatcgg

SEQ ID NO: 11442 - DNA, 47 bp, Artificial Sequence
  Amplification primer (forwards)
ggggacaagtttgtacaaaaaagcaggctctgcggctcaattagctg

SEQ ID NO: 11443 - DNA, 47 bp, Artificial Sequence
  Amplification primer (forwards)
ggggacaagtttgtacaaaaaagcaggctctcgtaccttcaaaccag

SEQ ID NO: 11444 - DNA, 50 bp, Artificial Sequence
  Amplification primer (forwards)
ggggacaagtttgtacaaaaaagcaggctctattaaagcaacttttactc

SEQ ID NO: 11445 - DNA, 46 bp, Artificial Sequence
  Amplification primer (forwards)
ggggacaagtttgtacaaaaaagcaggctcaatttttcagacaaca

SEQ ID NO: 11446 - DNA, 51 bp, Artificial Sequence
  Amplification primer (forwards)
ggggacaagtttgtacaaaaaagcaggctctagaaaacgtaatgatacatt

SEQ ID NO: 11447 - DNA, 49 bp, Artificial Sequence
  Amplification primer (forwards)
ggggacaagtttgtacaaaaaagcaggctctgattgtcaaattacacca

SEQ ID NO: 11448 - DNA, 48 bp, Artificial Sequence
  Amplification primer (forwards)
ggggacaagtttgtacaaaaaagcaggctctatttttcgtggtgataa

SEQ ID NO: 11449 - DNA, 49 bp, Artificial Sequence
  Amplification primer (forwards)
ggggacaagtttgtacaaaaaagcaggcttttttaatattgaatatcac

SEQ ID NO: 11450 - DNA, 49 bp, Artificial Sequence
  Amplification primer (forwards)
ggggacaagtttgtacaaaaaagcaggctctaagggagtccaatatatg

SEQ ID NO: 11451 - DNA, 47 bp, Artificial Sequence
  Amplification primer (forwards)
ggggacaagtttgtacaaaaaagcaggctctcgtcgcatgaatacca

SEQ ID NO: 11452 - DNA, 47 bp, Artificial Sequence
  Amplification primer (forwards)
ggggacaagtttgtacaaaaaagcaggctctatagaattttcagggc

SEQ ID NO: 11453 - DNA, 50 bp, Artificial Sequence
  Amplification primer (forwards)
ggggacaagtttgtacaaaaaagcaggctctgctactcactctaactcag

SEQ ID NO: 11454 - DNA, 46 bp, Artificial Sequence
  Amplification primer (forwards)
ggggacaagtttgtacaaaaaagcaggctgctcttcttcaaatact

SEQ ID NO: 11455 - DNA, 50 bp, Artificial Sequence
  Amplification primer (forwards)
ggggacaagtttgtacaaaaaagcaggctctctaacaccatttacaaaag

SEQ ID NO: 11456 - DNA, 50 bp, Artificial Sequence
  Amplification primer (forwards)
ggggacaagtttgtacaaaaaagcaggctctcaacaaggtattatggata

SEQ ID NO: 11457 - DNA, 49 bp, Artificial Sequence
  Amplification primer (forwards)
ggggacaagtttgtacaaaaaagcaggctctaaaattttaggtacacca

SEQ ID NO: 11458 - DNA, 48 bp, Artificial Sequence
  Amplification primer (forwards)
ggggacaagtttgtacaaaaaagcaggctctggaaaaatggttaagaa

SEQ ID NO: 11459 - DNA, 48 bp, Artificial Sequence
  Amplification primer (forwards)
ggggacaagtttgtacaaaaaagcaggctctaaattcgtccgaaccgt

SEQ ID NO: 11460 - DNA, 47 bp, Artificial Sequence
  Amplification primer (forwards)
ggggacaagtttgtacaaaaaagcaggctctggtcttccaacgcagc

SEQ ID NO: 11461 - DNA, 44 bp, Artificial Sequence
  Amplification primer (forwards)
ggggacaagtttgtacaaaaaagcaggctgctcaggtaaaacat

SEQ ID NO: 11462 - DNA, 47 bp, Artificial Sequence
  Amplification primer (forwards)
ggggacaagtttgtacaaaaaagcaggctctgaaagcaaatctttgc

SEQ ID NO: 11463 - DNA, 44 bp, Artificial Sequence
  Amplification primer (forwards)
ggggacaagtttgtacaaaaaagcaggctgtgctaattggattg

SEQ ID NO: 11464 - DNA, 44 bp, Artificial Sequence
  Amplification primer (forwards)
ggggacaagtttgtacaaaaaagcaggctgtggaaatgtcggag

SEQ ID NO: 11465 - DNA, 44 bp, Artificial Sequence
  Amplification primer (forwards)
ggggacaagtttgtacaaaaaagcaggctgtcagtcaaaccaca

SEQ ID NO: 11466 - DNA, 50 bp, Artificial Sequence
  Amplification primer (forwards)
ggggacaagtttgtacaaaaaagcaggctctgctagtttttattttttcc

SEQ ID NO: 11467 - DNA, 45 bp, Artificial Sequence
  Amplification primer (forwards)
ggggacaagtttgtacaaaaaagcaggctgtggaagtaaatcagc

SEQ ID NO: 11468 - DNA, 52 bp, Artificial Sequence; identical to SEQ ID NO: 11274
  Amplification primer (forwards)

SEQ ID NO: 11469 - DNA, 47 bp, Artificial Sequence
  Amplification primer (forwards)
ggggacaagtttgtacaaaaaagcaggctctattgctggtcctagtg

SEQ ID NO: 11470 - DNA, 46 bp, Artificial Sequence
  Amplification primer (forwards)
ggggacaagtttgtacaaaaaagcaggcttattttttggaaattgg

SEQ ID NO: 11471 - DNA, 49 bp, Artificial Sequence; identical to SEQ ID NO: 11115
  Amplification primer (forwards)

SEQ ID NO: 11472 - DNA, 48 bp, Artificial Sequence
  Amplification primer (forwards)
ggggacaagtttgtacaaaaaagcaggcttttatatgaaagaacaaca

SEQ ID NO: 11473 - DNA, 47 bp, Artificial Sequence
  Amplification primer (forwards)
ggggacaagtttgtacaaaaaagcaggctcaattattattgggttaa

SEQ ID NO: 11474 - DNA, 50 bp, Artificial Sequence
  Amplification primer (forwards)
ggggacaagtttgtacaaaaaagcaggctctcctaaattaaccctagtct

SEQ ID NO: 11475 - DNA, 47 bp, Artificial Sequence
  Amplification primer (forwards)
ggggacaagtttgtacaaaaaagcaggctctagtcttgcgaaggcag

SEQ ID NO: 11476 - DNA, 51 bp, Artificial Sequence
  Amplification primer (forwards)
ggggacaagtttgtacaaaaaagcaggctctgtatttacactcgtcttaca

SEQ ID NO: 11477 - DNA, 50 bp, Artificial Sequence; identical to SEQ ID NO: 11277
  Amplification primer (forwards)

SEQ ID NO: 11478 - DNA, 52 bp, Artificial Sequence; identical to SEQ ID NO: 11274
  Amplification primer (forwards)

SEQ ID NO: 11479 - DNA, 48 bp, Artificial Sequence
  Amplification primer (forwards)
ggggacaagtttgtacaaaaaagcaggctctggttcatcagacaaaca

SEQ ID NO: 11480 - DNA, 53 bp, Artificial Sequence
  Amplification primer (forwards)
ggggacaagtttgtacaaaaaagcaggctctgtagttaaagttggtattaacg

SEQ ID NO: 11481 - DNA, 51 bp, Artificial Sequence
  Amplification primer (forwards)
ggggacaagtttgtacaaaaaagcaggctctgtattagaagtacatgctga

SEQ ID NO: 11482 - DNA, 48 bp, Artificial Sequence
  Amplification primer (forwards)
ggggacaagtttgtacaaaaaagcaggctctgagacaccagtaatggc

SEQ ID NO: 11483 - DNA, 47 bp, Artificial Sequence
  Amplification primer (forwards)
ggggacaagtttgtacaaaaaagcaggctctgctaacaagcaggatc

SEQ ID NO: 11484 - DNA, 52 bp, Artificial Sequence
  Amplification primer (forwards)
ggggacaagtttgtacaaaaaagcaggctctaataagtccagtaactctaag

SEQ ID NO: 11485 - DNA, 50 bp, Artificial Sequence
  Amplification primer (forwards)
ggggacaagtttgtacaaaaaagcaggctctgcttttgatgtaattatgc

SEQ ID NO: 11486 - DNA, 51 bp, Artificial Sequence
  Amplification primer (forwards)
ggggacaagtttgtacaaaaaagcaggctctattaactatgaggttaaagc

SEQ ID NO: 11487 - DNA, 52 bp, Artificial Sequence
  Amplification primer (forwards)
ggggacaagtttgtacaaaaaagcaggctctgtaattgttgaacttagtttg

SEQ ID NO: 11488 - DNA, 50 bp, Artificial Sequence
  Amplification primer (forwards)
ggggacaagtttgtacaaaaaagcaggctctcttaggaagtataagcaaa

SEQ ID NO: 11489 - DNA, 48 bp, Artificial Sequence
  Amplification primer (forwards)
ggggacaagtttgtacaaaaaagcaggctctaaaatttgtctggttgg

SEQ ID NO: 11490 - DNA, 52 bp, Artificial Sequence
  Amplification primer (forwards)
ggggacaagtttgtacaaaaaagcaggctctgacttttatgatatcaatctt

SEQ ID NO: 11491 - DNA, 47 bp, Artificial Sequence
  Amplification primer (forwards)
ggggacaagtttgtacaaaaaagcaggctatgctattatgcaaaaag

SEQ ID NO: 11492 - DNA, 47 bp, Artificial Sequence
  Amplification primer (forwards)
ggggacaagtttgtacaaaaaagcaggctctgcaatcgtttcagcag

SEQ ID NO: 11493 - DNA, 50 bp, Artificial Sequence
  Amplification primer (reverse)
ggggaccactttgtacaagaaagctgggttatttttagacatcatagaca

SEQ ID NO: 11494 - DNA, 45 bp, Artificial Sequence
  Amplification primer (reverse)
ggggaccactttgtacaagaaagctgggttgggaatgcctacaaa

SEQ ID NO: 11495 - DNA, 50 bp, Artificial Sequence
  Amplification primer (reverse)
ggggaccactttgtacaagaaagctgggttttttttactatactttttgt

SEQ ID NO: 11496 - DNA, 48 bp, Artificial Sequence
  Amplification primer (reverse)
ggggaccactttgtacaagaaagctgggttttcctttttaggcttact

SEQ ID NO: 11497 - DNA, 48 bp, Artificial Sequence
  Amplification primer (reverse)
ggggaccactttgtacaagaaagctgggttattagcttcatttgtcag

SEQ ID NO: 11498 - DNA, 50 bp, Artificial Sequence
  Amplification primer (reverse)
ggggaccactttgtacaagaaagctgggttagtttcttctttaaaatcat

SEQ ID NO: 11499 - DNA, 48 bp, Artificial Sequence
  Amplification primer (reverse)
ggggaccactttgtacaagaaagctgggttctctgaagctgtaaaacc

SEQ ID NO: 11500 - DNA, 49 bp, Artificial Sequence
  Amplification primer (reverse)
ggggaccactttgtacaagaaagctgggtttttatcaatgtttgaaacg

SEQ ID NO: 11501 - DNA, 50 bp, Artificial Sequence
  Amplification primer (reverse)
ggggaccactttgtacaagaaagctgggtttagtaaatcaagtttttgca

SEQ ID NO: 11502 - DNA, 47 bp, Artificial Sequence
  Amplification primer (reverse)
ggggaccactttgtacaagaaagctgggttatcccttctattttcga

SEQ ID NO: 11503 - DNA, 49 bp, Artificial Sequence
  Amplification primer (reverse)
ggggaccactttgtacaagaaagctgggttatgtagtgacgtttctgtg

SEQ ID NO: 11504 - DNA, 49 bp, Artificial Sequence; identical to SEQ ID NO: 11503
  Amplification primer (reverse)

SEQ ID NO: 11505 - DNA, 46 bp, Artificial Sequence
  Amplification primer (reverse)
ggggaccactttgtacaagaaagctgggttattgggtgtaagcatt

SEQ ID NO: 11506 - DNA, 47 bp, Artificial Sequence
  Amplification primer (reverse)
ggggaccactttgtacaagaaagctgggttcttaactctacccgtcc

SEQ ID NO: 11507 - DNA, 50 bp, Artificial Sequence
  Amplification primer (reverse)
ggggaccactttgtacaagaaagctgggttttttctcttattaaagaatt

SEQ ID NO: 11508 - DNA, 48 bp, Artificial Sequence
  Amplification primer (reverse)
ggggaccactttgtacaagaaagctgggttataccagccgttactatt

SEQ ID NO: 11509 - DNA, 49 bp, Artificial Sequence
  Amplification primer (reverse)
ggggaccactttgtacaagaaagctgggtttttagctgcttttttaatg

SEQ ID NO: 11510 - DNA, 50 bp, Artificial Sequence
  Amplification primer (reverse)
ggggaccactttgtacaagaaagctgggttaaatactacatttacaggtg

SEQ ID NO: 11511 - DNA, 49 bp, Artificial Sequence
  Amplification primer (reverse)
ggggaccactttgtacaagaaagctgggttttggttattctcctttaat

SEQ ID NO: 11512 - DNA, 50 bp, Artificial Sequence
  Amplification primer (reverse)
ggggaccactttgtacaagaaagctgggttattatatttttggatatttc

SEQ ID NO: 11513 - DNA, 47 bp, Artificial Sequence
  Amplification primer (reverse)
ggggaccactttgtacaagaaagctgggttgggctttttcttaaaaa

SEQ ID NO: 11514 - DNA, 45 bp, Artificial Sequence
  Amplification primer (reverse)
ggggaccactttgtacaagaaagctgggttgttggcatccctttt

SEQ ID NO: 11515 - DNA, 46 bp, Artificial Sequence
  Amplification primer (reverse)
ggggaccactttgtacaagaaagctgggttcttttgatgggattgg

SEQ ID NO: 11516 - DNA, 47 bp, Artificial Sequence
  Amplification primer (reverse)
ggggaccactttgtacaagaaagctgggttttgatttaacgatttga

SEQ ID NO: 11517 - DNA, 51 bp, Artificial Sequence
  Amplification primer (reverse)
ggggaccactttgtacaagaaagctgggtttttatctcctctaaaataatg

SEQ ID NO: 11518 - DNA, 48 bp, Artificial Sequence
  Amplification primer (reverse)
ggggaccactttgtacaagaaagctgggttctttgataagtcagacca

SEQ ID NO: 11519 - DNA, 46 bp, Artificial Sequence
  Amplification primer (reverse)
ggggaccactttgtacaagaaagctgggttgtaaccccaagctgat

SEQ ID NO: 11520 - DNA, 47 bp, Artificial Sequence
  Amplification primer (reverse)
ggggaccactttgtacaagaaagctgggtttgattttgcaatatcaa

SEQ ID NO: 11521 - DNA, 51 bp, Artificial Sequence
  Amplification primer (reverse)
ggggaccactttgtacaagaaagctgggtttttttgtaatttaagtactaa

SEQ ID NO: 11522 - DNA, 50 bp, Artificial Sequence
  Amplification primer (reverse)
ggggaccactttgtacaagaaagctgggttttcttttatattaagagctt

SEQ ID NO: 11523 - DNA, 47 bp, Artificial Sequence
  Amplification primer (reverse)
ggggaccactttgtacaagaaagctgggttattcggataaatgtagc

SEQ ID NO: 11524 - DNA, 47 bp, Artificial Sequence
  Amplification primer (reverse)
ggggaccactttgtacaagaaagctgggtttccatttttatcctcac

SEQ ID NO: 11525 - DNA, 47 bp, Artificial Sequence; identical to SEQ ID NO: 11524
  Amplification primer (reverse)

SEQ ID NO: 11526 - DNA, 47 bp, Artificial Sequence
  Amplification primer (reverse)
ggggaccactttgtacaagaaagctgggttatgacctctactttcca

SEQ ID NO: 11527 - DNA, 47 bp, Artificial Sequence
  Amplification primer (reverse)
ggggaccactttgtacaagaaagctgggttcttgtaatcacttggac

SEQ ID NO: 11528 - DNA, 48 bp, Artificial Sequence
  Amplification primer (reverse)
ggggaccactttgtacaagaaagctgggttattaatcatggtattggt

SEQ ID NO: 11529 - DNA, 46 bp, Artificial Sequence
  Amplification primer (reverse)
ggggaccactttgtacaagaaagctgggttccattgtggaatatca

SEQ ID NO: 11530 - DNA, 47 bp, Artificial Sequence
  Amplification primer (reverse)
ggggaccactttgtacaagaaagctgggtttttgtaaagcagttctt

SEQ ID NO: 11531 - DNA, 51 bp, Artificial Sequence
  Amplification primer (reverse)
ggggaccactttgtacaagaaagctgggttatcattcatatgatctctaga

SEQ ID NO: 11532 - DNA, 49 bp, Artificial Sequence
  Amplification primer (reverse)
ggggaccactttgtacaagaaagctgggttattttgattgattctactc

SEQ ID NO: 11533 - DNA, 48 bp, Artificial Sequence
  Amplification primer (reverse)
ggggaccactttgtacaagaaagctgggttttttgtttttttcaaata

SEQ ID NO: 11534 - DNA, 46 bp, Artificial Sequence
  Amplification primer (reverse)
ggggaccactttgtacaagaaagctgggttatcttcaacgtcctcc

SEQ ID NO: 11535 - DNA, 47 bp, Artificial Sequence
  Amplification primer (reverse)
ggggaccactttgtacaagaaagctgggttaaagtcaaaggaaactt

SEQ ID NO: 11536 - DNA, 52 bp, Artificial Sequence
  Amplification primer (reverse)
ggggaccactttgtacaagaaagctgggttttctttatctaatttataatag

SEQ ID NO: 11537 - DNA, 46 bp, Artificial Sequence
  Amplification primer (reverse)
ggggaccactttgtacaagaaagctgggttttgcaatgttttttct

SEQ ID NO: 11538 - DNA, 49 bp, Artificial Sequence
  Amplification primer (reverse)
ggggaccactttgtacaagaaagctgggtttaaactttggataatctgt

SEQ ID NO: 11539 - DNA, 48 bp, Artificial Sequence
  Amplification primer (reverse)
ggggaccactttgtacaagaaagctgggttgttgaaattttgatatga

SEQ ID NO: 11540 - DNA, 52 bp, Artificial Sequence
  Amplification primer (reverse)
ggggaccactttgtacaagaaagctgggttctcctttactatatagctaact

SEQ ID NO: 11541 - DNA, 48 bp, Artificial Sequence
  Amplification primer (reverse)
ggggaccactttgtacaagaaagctgggttttgtttgtgaagtaaaac

SEQ ID NO: 11542 - DNA, 50 bp, Artificial Sequence
  Amplification primer (reverse)
ggggaccactttgtacaagaaagctgggtttgataatatctccatatttt

SEQ ID NO: 11543 - DNA, 44 bp, Artificial Sequence
  Amplification primer (reverse)
ggggaccactttgtacaagaaagctgggttgcattggcgccata

SEQ ID NO: 11544 - DNA, 49 bp, Artificial Sequence
  Amplification primer (reverse)
ggggaccactttgtacaagaaagctgggttttctacacgacttttattc

SEQ ID NO: 11545 - DNA, 46 bp, Artificial Sequence
  Amplification primer (reverse)
ggggaccactttgtacaagaaagctgggttaagacctcctcgagat

SEQ ID NO: 11546 - DNA, 48 bp, Artificial Sequence
  Amplification primer (reverse)
ggggaccactttgtacaagaaagctgggtttgttttttctttctgttg

SEQ ID NO: 11547 - DNA, 47 bp, Artificial Sequence
  Amplification primer (reverse)
ggggaccactttgtacaagaaagctgggtttggattagtttgacctg

SEQ ID NO: 11548 - DNA, 49 bp, Artificial Sequence
  Amplification primer (reverse)
ggggaccactttgtacaagaaagctgggtttttatcgtaagcacttagg

SEQ ID NO: 11549 - DNA, 46 bp, Artificial Sequence
  Amplification primer (reverse)
ggggaccactttgtacaagaaagctgggttctccttccaggcatcg

SEQ ID NO: 11550 - DNA, 52 bp, Artificial Sequence
  Amplification primer (reverse)
ggggaccactttgtacaagaaagctgggttgtaaaagtatcttaaatagtca

SEQ ID NO: 11551 - DNA, 45 bp, Artificial Sequence
  Amplification primer (reverse)
ggggaccactttgtacaagaaagctgggtttgccattcctcctct

SEQ ID NO: 11552 - DNA, 49 bp, Artificial Sequence
  Amplification primer (reverse)
ggggaccactttgtacaagaaagctgggtttgttacctttttattttct

SEQ ID NO: 11553 - DNA, 46 bp, Artificial Sequence
  Amplification primer (reverse)
ggggaccactttgtacaagaaagctgggtttttttcatgcgattga

SEQ ID NO: 11554 - DNA, 49 bp, Artificial Sequence
  Amplification primer (reverse)
ggggaccactttgtacaagaaagctgggttgagacgtttcttatacctt

SEQ ID NO: 11555 - DNA, 49 bp, Artificial Sequence
  Amplification primer (reverse)
ggggaccactttgtacaagaaagctgggtttgtaccatatgttctctct

SEQ ID NO: 11556 - DNA, 48 bp, Artificial Sequence
  Amplification primer (reverse)
ggggaccactttgtacaagaaagctgggttaaaagttggactactttc

SEQ ID NO: 11557 - DNA, 43 bp, Artificial Sequence
  Amplification primer (reverse)
ggggaccactttgtacaagaaagctgggtttcgttttccaccc

SEQ ID NO: 11558 - DNA, 43 bp, Artificial Sequence; identical to SEQ ID NO: 11557
  Amplification primer (reverse)

SEQ ID NO: 11559 - DNA, 50 bp, Artificial Sequence
  Amplification primer (reverse)
ggggaccactttgtacaagaaagctgggttatttgggtaaatatagtaaa

SEQ ID NO: 11560 - DNA, 48 bp, Artificial Sequence
  Amplification primer (reverse)
ggggaccactttgtacaagaaagctgggtttttacgactaacctcaac

SEQ ID NO: 11561 - DNA, 45 bp, Artificial Sequence
  Amplification primer (reverse)
ggggaccactttgtacaagaaagctgggttaattccttttggtgg

SEQ ID NO: 11562 - DNA, 46 bp, Artificial Sequence
  Amplification primer (reverse)
ggggaccactttgtacaagaaagctgggttggcagaatacaccttc

SEQ ID NO: 11563 - DNA, 46 bp, Artificial Sequence
  Amplification primer (reverse)
ggggaccactttgtacaagaaagctgggttggctgacgtcgacgca

SEQ ID NO: 11564 - DNA, 52 bp, Artificial Sequence
  Amplification primer (reverse)
ggggaccactttgtacaagaaagctgggttaactctcttaatatattcttct

SEQ ID NO: 11565 - DNA, 49 bp, Artificial Sequence
  Amplification primer (reverse)
ggggaccactttgtacaagaaagctgggttgtctttttcaatattctgt

SEQ ID NO: 11566 - DNA, 49 bp, Artificial Sequence; identical to SEQ ID NO: 11565
  Amplification primer (reverse)

SEQ ID NO: 11567 - DNA, 49 bp, Artificial Sequence
  Amplification primer (reverse)
ggggaccactttgtacaagaaagctgggttcttctccttaggagtaacg

SEQ ID NO: 11568 - DNA, 53 bp, Artificial Sequence
  Amplification primer (reverse)
ggggaccactttgtacaagaaagctgggttattattatcaattaataactctt

SEQ ID NO: 11569 - DNA, 48 bp, Artificial Sequence
  Amplification primer (reverse)
ggggaccactttgtacaagaaagctgggttgtcaaacatacttccaaa

SEQ ID NO: 11570 - DNA, 46 bp, Artificial Sequence
  Amplification primer (reverse)
ggggaccactttgtacaagaaagctgggtttttcgtcgtataagca

SEQ ID NO: 11571 - DNA, 46 bp, Artificial Sequence; identical to SEQ ID NO: 11570
  Amplification primer (reverse)

SEQ ID NO: 11572 - DNA, 47 bp, Artificial Sequence
  Amplification primer (reverse)
ggggaccactttgtacaagaaagctgggtttgtcctcattttttcag

SEQ ID NO: 11573 - DNA, 47 bp, Artificial Sequence
  Amplification primer (reverse)
ggggaccactttgtacaagaaagctgggttaatacttgctggaacag

SEQ ID NO: 11574 - DNA, 48 bp, Artificial Sequence
  Amplification primer (reverse)
ggggaccactttgtacaagaaagctgggttgtctttcttcaattttgg

SEQ ID NO: 11575 - DNA, 48 bp, Artificial Sequence
  Amplification primer (reverse)
ggggaccactttgtacaagaaagctgggttgtcgtgatttttatgagt

SEQ ID NO: 11576 - DNA, 46 bp, Artificial Sequence
  Amplification primer (reverse)
ggggaccactttgtacaagaaagctgggttcccaaactggcataac

SEQ ID NO: 11577 - DNA, 46 bp, Amplification primer (reverse); identical to SEQ ID NO: 11576

SEQ ID NO: 11578 - DNA, 46 bp, Artificial Sequence
  Amplification primer (reverse)
ggggaccactttgtacaagaaagctgggtttgaaggacgtttgttg

SEQ ID NO: 11579 - DNA, 49 bp, Artificial Sequence
  Amplification primer (reverse)
ggggaccactttgtacaagaaagctgggtttttttttagtttaaggcta

SEQ ID NO: 11580 - DNA, 44 bp, Artificial Sequence
  Amplification primer (reverse)
ggggaccactttgtacaagaaagctgggttgtccaccttccgat

SEQ ID NO: 11581 - DNA, 48 bp, Artificial Sequence
  Amplification primer (reverse)
ggggaccactttgtacaagaaagctgggttaacattgtttttcctttc

SEQ ID NO: 11582 - DNA, 46 bp, Artificial Sequence
  Amplification primer (reverse)
ggggaccactttgtacaagaaagctgggttatggtgatgatgacct

SEQ ID NO: 11583 - DNA, 47 bp, Artificial Sequence
  Amplification primer (reverse)
ggggaccactttgtacaagaaagctgggttattaacattttgagggt

SEQ ID NO: 11584 - DNA, 46 bp, Artificial Sequence
  Amplification primer (reverse)
ggggaccactttgtacaagaaagctgggttttttgcaaaatcaaca

SEQ ID NO: 11585 - DNA, 51 bp, Artificial Sequence
  Amplification primer (reverse)
ggggaccactttgtacaagaaagctgggttgaataaataactgtatttttt

SEQ ID NO: 11586 - DNA, 49 bp, Artificial Sequence
  Amplification primer (reverse)
ggggaccactttgtacaagaaagctgggttattttcattaatttcctct

SEQ ID NO: 11587 - DNA, 48 bp, Artificial Sequence
  Amplification primer (reverse)
ggggaccactttgtacaagaaagctgggttgatagctaattggtctgt

SEQ ID NO: 11588 - DNA, 48 bp, Artificial Sequence
  Amplification primer (reverse)
ggggaccactttgtacaagaaagctgggtttaaaagatgagcttctcg

SEQ ID NO: 11589 - DNA, 48 bp, Artificial Sequence
  Amplification primer (reverse)
ggggaccactttgtacaagaaagctgggttaatttcaatatagcgacg

SEQ ID NO: 11590 - DNA, 48 bp, Artificial Sequence
  Amplification primer (reverse)
ggggaccactttgtacaagaaagctgggttcttgtttgtctttacctt

SEQ ID NO: 11591 - DNA, 47 bp, Artificial Sequence
  Amplification primer (reverse)
ggggaccactttgtacaagaaagctgggttattatccttcaaagctg

SEQ ID NO: 11592 - DNA, 50 bp, Artificial Sequence
  Amplification primer (reverse)
ggggaccactttgtacaagaaagctgggtttgtgtcatataatgtaacca

SEQ ID NO: 11593 - DNA, 47 bp, Artificial Sequence
  Amplification primer (reverse)
ggggaccactttgtacaagaaagctgggtttgatcttaattttcgag

SEQ ID NO: 11594 - DNA, 46 bp, Artificial Sequence
  Amplification primer (reverse)
ggggaccactttgtacaagaaagctgggttccaaacaggttgatct

SEQ ID NO: 11595 - DNA, 49 bp, Artificial Sequence
  Amplification primer (reverse)
ggggaccactttgtacaagaaagctgggttatttacatcagactgtgac

SEQ ID NO: 11596 - DNA, 46 bp, Artificial Sequence
  Amplification primer (reverse)
ggggaccactttgtacaagaaagctgggtttttatggccaataaca

SEQ ID NO: 11597 - DNA, 50 bp, Artificial Sequence
  Amplification primer (reverse)
ggggaccactttgtacaagaaagctgggttttttttagtagttgtcaatt

SEQ ID NO: 11598 - DNA, 47 bp, Artificial Sequence
  Amplification primer (reverse)
ggggaccactttgtacaagaaagctgggttgtaagctgaattttcga

SEQ ID NO: 11599 - DNA, 47 bp, Artificial Sequence
  Amplification primer (reverse)
ggggaccactttgtacaagaaagctgggttacgagagtggttattgg

SEQ ID NO: 11600 - DNA, 50 bp, Artificial Sequence
  Amplification primer (reverse)
ggggaccactttgtacaagaaagctgggtttttcttcactctttctagag

SEQ ID NO: 11601 - DNA, 46 bp, Artificial Sequence
  Amplification primer (reverse)
ggggaccactttgtacaagaaagctgggttcggccagttttttctt

SEQ ID NO: 11602 - DNA, 46 bp, Artificial Sequence
  Amplification primer (reverse)
ggggaccactttgtacaagaaagctgggttaacacctggtgggcgt

SEQ ID NO: 11603 - DNA, 49 bp, Artificial Sequence
  Amplification primer (reverse)
ggggaccactttgtacaagaaagctgggttactatttctaattgctctg

SEQ ID NO: 11604 - DNA, 46 bp, Artificial Sequence
  Amplification primer (reverse)
ggggaccactttgtacaagaaagctgggtttggtcccggtgcgcca

SEQ ID NO: 11605 - DNA, 49 bp, Artificial Sequence; identical to SEQ ID NO: 11603
  Amplification primer (reverse)

SEQ ID NO: 11606 - DNA, 47 bp, Artificial Sequence
  Amplification primer (reverse)
ggggaccactttgtacaagaaagctgggttcttagcagattcatccc

SEQ ID NO: 11607 - DNA, 49 bp, Artificial Sequence
  Amplification primer (reverse)
ggggaccactttgtacaagaaagctgggtttttactatttgaaaattgg

SEQ ID NO: 11608 - DNA, 49 bp, Artificial Sequence
  Amplification primer (reverse)
ggggaccactttgtacaagaaagctgggtttttcataggaacttgtatt

SEQ ID NO: 11609 - DNA, 46 bp, Artificial Sequence
  Amplification primer (reverse)
ggggaccactttgtacaagaaagctgggttgtccacacctgcgact

SEQ ID NO: 11610 - DNA, 46 bp, Artificial Sequence; identical to SEQ ID NO: 11609
  Amplification primer (reverse)

SEQ ID NO: 11611 - DNA, 51 bp, Artificial Sequence
  Amplification primer (reverse)
ggggaccactttgtacaagaaagctgggtttttacctaagtaatattctga

SEQ ID NO: 11612 - DNA, 46 bp, Artificial Sequence
  Amplification primer (reverse)
ggggaccactttgtacaagaaagctgggtttccccgtcttttttgt

SEQ ID NO: 11613 - DNA, 48 bp, Artificial Sequence
  Amplification primer (reverse)
ggggaccactttgtacaagaaagctgggttgtcgtaatcataaaagcc

SEQ ID NO: 11614 - DNA, 48 bp, Artificial Sequence
  Amplification primer (reverse)
ggggaccactttgtacaagaaagctgggttttcataacgaaccataac

SEQ ID NO: 11615 - DNA, 47 bp, Artificial Sequence
  Amplification primer (reverse)
ggggaccactttgtacaagaaagctgggtttttgagttctagcaacg

SEQ ID NO: 11616 - DNA, 49 bp, Artificial Sequence
  Amplification primer (reverse)
ggggaccactttgtacaagaaagctgggttttttttatcttcttcttgc

SEQ ID NO: 11617 - DNA, 48 bp, Artificial Sequence
  Amplification primer (reverse)
ggggaccactttgtacaagaaagctgggttttttaaaacctggtaaac

SEQ ID NO: 11618 - DNA, 46 bp, Artificial Sequence
  Amplification primer (reverse)
ggggaccactttgtacaagaaagctgggtttcagctcgtactgttt

SEQ ID NO: 11619 - DNA, 46 bp, Artificial Sequence
  Amplification primer (reverse)
ggggaccactttgtacaagaaagctgggttgtcctcctcaattggt

SEQ ID NO: 11620 - DNA, 47 bp, Artificial Sequence
  Amplification primer (reverse)
ggggaccactttgtacaagaaagctgggttctcttttatacgcgatg

SEQ ID NO: 11621 - DNA, 47 bp, Artificial Sequence
  Amplification primer (reverse)
ggggaccactttgtacaagaaagctgggttgttatttgctcgttgtt

SEQ ID NO: 11622 - DNA, 48 bp, Artificial Sequence
  Amplification primer (reverse)
ggggaccactttgtacaagaaagctgggtttttctcaaatgttttcat

SEQ ID NO: 11623 - DNA, 48 bp, Artificial Sequence
  Amplification primer (reverse)
ggggaccactttgtacaagaaagctgggtttttcaaatgatctacagc

SEQ ID NO: 11624 - DNA, 46 bp, Artificial Sequence
  Amplification primer (reverse)
ggggaccactttgtacaagaaagctgggttggctagtgtctgtccg

SEQ ID NO: 11625 - DNA, 48 bp, Artificial Sequence
  Amplification primer (reverse)
ggggaccactttgtacaagaaagctgggttaccatctatttttacccc

SEQ ID NO: 11626 - DNA, 46 bp, Artificial Sequence
  Amplification primer (reverse)
ggggaccactttgtacaagaaagctgggttagaacccgcactctca

SEQ ID NO: 11627 - DNA, 46 bp, Artificial Sequence
  Amplification primer (reverse)
ggggaccactttgtacaagaaagctgggttgaacgcaacggctgct

SEQ ID NO: 11628 - DNA, 50 bp, Artificial Sequence
  Amplification primer (reverse)
ggggaccactttgtacaagaaagctgggtttttcatatcaaaaactatcg

SEQ ID NO: 11629 - DNA, 50 bp, Artificial Sequence
  Amplification primer (reverse)
ggggaccactttgtacaagaaagctgggttttctttatctcttaatgctt

SEQ ID NO: 11630 - DNA, 49 bp, Artificial Sequence
  Amplification primer (reverse)
ggggaccactttgtacaagaaagctgggttcacaacagttattttttca

SEQ ID NO: 11631 - DNA, 46 bp, Artificial Sequence
  Amplification primer (reverse)
ggggaccactttgtacaagaaagctgggttaggcccttctgagtag

SEQ ID NO: 11632 - DNA, 46 bp, Artificial Sequence; identical to SEQ ID NO: 11631
  Amplification primer (reverse)

SEQ ID NO: 11633 - DNA, 47 bp, Artificial Sequence
  Amplification primer (reverse)
ggggaccactttgtacaagaaagctgggttaaataatccaatggctg

SEQ ID NO: 11634 - DNA, 47 bp, Artificial Sequence
  Amplification primer (reverse)
ggggaccactttgtacaagaaagctgggttcttttcaagctttttcc

SEQ ID NO: 11635 - DNA, 48 bp, Artificial Sequence
  Amplification primer (reverse)
ggggaccactttgtacaagaaagctgggttaaaatgatcagtttgagg

SEQ ID NO: 11636 - DNA, 47 bp, Artificial Sequence
  Amplification primer (reverse)
ggggaccactttgtacaagaaagctgggtttttttggcttaagaaag

SEQ ID NO: 11637 - DNA, 51 bp, Artificial Sequence
  Amplification primer (reverse)
ggggaccactttgtacaagaaagctgggttcttacgatacattttaaattg

SEQ ID NO: 11638 - DNA, 49 bp, Artificial Sequence
  Amplification primer (reverse)
ggggaccactttgtacaagaaagctgggttttctttttttactttagcg

SEQ ID NO: 11639 - DNA, 46 bp, Artificial Sequence
  Amplification primer (reverse)
ggggaccactttgtacaagaaagctgggttccattgcaatccagca

SEQ ID NO: 11640 - DNA, 46 bp, Artificial Sequence
  Amplification primer (reverse)
ggggaccactttgtacaagaaagctgggttatgtttatggcttgct

SEQ ID NO: 11641 - DNA, 46 bp, Artificial Sequence
  Amplification primer (reverse)
ggggaccactttgtacaagaaagctgggtttttttgataaatcccc

SEQ ID NO: 11642 - DNA, 49 bp, Artificial Sequence
  Amplification primer (reverse)
ggggaccactttgtacaagaaagctgggttatatgtgtattcatccttt

SEQ ID NO: 11643 - DNA, 50 bp, Artificial Sequence
  Amplification primer (reverse)
ggggaccactttgtacaagaaagctgggtttacttctatttttccatctg

SEQ ID NO: 11644 - DNA, 49 bp, Artificial Sequence
  Amplification primer (reverse)
ggggaccactttgtacaagaaagctgggttgtaatgcaataaatcaaaa

SEQ ID NO: 11645 - DNA, 46 bp, Artificial Sequence
  Amplification primer (reverse)
ggggaccactttgtacaagaaagctgggttggattttagtttcgca

SEQ ID NO: 11646 - DNA, 46 bp, Artificial Sequence
  Amplification primer (reverse)
ggggaccactttgtacaagaaagctgggttcccattgatttcgtcg

SEQ ID NO: 11647 - DNA, 48 bp, Artificial Sequence
  Amplification primer (reverse)
ggggaccactttgtacaagaaagctgggtttacctctttcaataccac

SEQ ID NO: 11648 - DNA, 49 bp, Artificial Sequence
  Amplification primer (reverse)
ggggaccactttgtacaagaaagctgggttattaccgttaggtactgta

SEQ ID NO: 11649 - DNA, 48 bp, Artificial Sequence
  Amplification primer (reverse)
ggggaccactttgtacaagaaagctgggttggtatggttaacagaatc

SEQ ID NO: 11650 - DNA, 50 bp, Artificial Sequence
  Amplification primer (reverse)
ggggaccactttgtacaagaaagctgggttatataccctagactttttga

SEQ ID NO: 11651 - DNA, 50 bp, Artificial Sequence
  Amplification primer (reverse)
ggggaccactttgtacaagaaagctgggttaggagttttattgatgatat

SEQ ID NO: 11652 - DNA, 47 bp, Artificial Sequence
  Amplification primer (reverse)
ggggaccactttgtacaagaaagctgggttaaatgattgtggaaaaa

SEQ ID NO: 11653 - DNA, 49 bp, Artificial Sequence
  Amplification primer (reverse)
ggggaccactttgtacaagaaagctgggttatcaaagaagttgacattg

SEQ ID NO: 11654 - DNA, 49 bp, Artificial Sequence; identical to SEQ ID NO: 11653
  Amplification primer (reverse)

SEQ ID NO: 11655 - DNA, 50 bp, Artificial Sequence
  Amplification primer (reverse)
ggggaccactttgtacaagaaagctgggttgttagataaattaaccagtg

SEQ ID NO: 11656 - DNA, 46 bp, Artificial Sequence
  Amplification primer (reverse)
ggggaccactttgtacaagaaagctgggttccctttgcttcgttgt

SEQ ID NO: 11657 - DNA, 46 bp, Artificial Sequence
  Amplification primer (reverse)
ggggaccactttgtacaagaaagctgggttttccacaagtccgatt

SEQ ID NO: 11658 - DNA, 46 bp, Artificial Sequence
  Amplification primer (reverse)
ggggaccactttgtacaagaaagctgggttttgtttgattcgtcct

SEQ ID NO: 11659 - DNA, 46 bp, Artificial Sequence
  Amplification primer (reverse)
ggggaccactttgtacaagaaagctgggttactaccaaactgctgg

SEQ ID NO: 11660 - DNA, 50 bp, Artificial Sequence
  Amplification primer (reverse)
ggggaccactttgtacaagaaagctgggttttgtgtatttttagttaggt

SEQ ID NO: 11661 - DNA, 47 bp, Artificial Sequence
  Amplification primer (reverse)
ggggaccactttgtacaagaaagctgggttgtggataaaattcgaaa

SEQ ID NO: 11662 - DNA, 47 bp, Artificial Sequence
  Amplification primer (reverse)
ggggaccactttgtacaagaaagctgggttcagactgactaggagct

SEQ ID NO: 11663 - DNA, 48 bp, Artificial Sequence
  Amplification primer (reverse)
ggggaccactttgtacaagaaagctgggttgacttgtaattgattcgc

SEQ ID NO: 11664 - DNA, 46 bp, Artificial Sequence
  Amplification primer (reverse)
ggggaccactttgtacaagaaagctgggttgaaggcaccaccacct

SEQ ID NO: 11665 - DNA, 52 bp, Artificial Sequence
  Amplification primer (reverse)
ggggaccactttgtacaagaaagctgggttgttgtatagatgagttaatctg

SEQ ID NO: 11666 - DNA, 47 bp, Artificial Sequence
  Amplification primer (reverse)
ggggaccactttgtacaagaaagctgggttacggtttttaaagaatg

SEQ ID NO: 11667 - DNA, 49 bp, Artificial Sequence
  Amplification primer (reverse)
ggggaccactttgtacaagaaagctgggtttttttctttatcttctgtg

SEQ ID NO: 11668 - DNA, 47 bp, Artificial Sequence
  Amplification primer (reverse)
ggggaccactttgtacaagaaagctgggttcgattttgtaagagctt

SEQ ID NO: 11669 - DNA, 46 bp, Artificial Sequence
  Amplification primer (reverse)
ggggaccactttgtacaagaaagctgggttcgacgaagctatttct

SEQ ID NO: 11670 - DNA, 46 bp, Artificial Sequence
  Amplification primer (reverse)
ggggaccactttgtacaagaaagctgggtttaaggcttgcattttg

SEQ ID NO: 11671 - DNA, 48 bp, Artificial Sequence
  Amplification primer (reverse)
ggggaccactttgtacaagaaagctgggttttttcctaaaaattttcc

SEQ ID NO: 11672 - DNA, 46 bp, Artificial Sequence
  Amplification primer (reverse)
ggggaccactttgtacaagaaagctgggttggcatctcctagcttt

SEQ ID NO: 11673 - DNA, 50 bp, Artificial Sequence
  Amplification primer (reverse)
ggggaccactttgtacaagaaagctgggtttgataaaggtagttctacac

SEQ ID NO: 11674 - DNA, 50 bp, Amplification primer (reverse); identical to SEQ ID NO: 11673

SEQ ID NO: 11675 - DNA, 48 bp, Artificial Sequence
  Amplification primer (reverse)
ggggaccactttgtacaagaaagctgggttttttagatgtttttgtgg

SEQ ID NO: 11676 - DNA, 49 bp, Artificial Sequence
  Amplification primer (reverse)
ggggaccactttgtacaagaaagctgggttatgattgataattttaagc

SEQ ID NO: 11677 - DNA, 46 bp, Artificial Sequence
  Amplification primer (reverse)
ggggaccactttgtacaagaaagctgggtttgctttttgatatgcc

SEQ ID NO: 11678 - DNA, 50 bp, Artificial Sequence
  Amplification primer (reverse)
ggggaccactttgtacaagaaagctgggtttaaaataaagttcagaaaag

SEQ ID NO: 11679 - DNA, 47 bp, Artificial Sequence
  Amplification primer (reverse)
ggggaccactttgtacaagaaagctgggtttttctcccttgactttc

SEQ ID NO: 11680 - DNA, 47 bp, Artificial Sequence
  Amplification primer (reverse)
ggggaccactttgtacaagaaagctgggttctttttctcagatgctt

SEQ ID NO: 11681 - DNA, 46 bp, Artificial Sequence
  Amplification primer (reverse)
ggggaccactttgtacaagaaagctgggttgacattgaaacggaat

SEQ ID NO: 11682 - DNA, 48 bp, Artificial Sequence
  Amplification primer (reverse)
ggggaccactttgtacaagaaagctgggttttttatcaatgatgttga

SEQ ID NO: 11683 - DNA, 46 bp, Artificial Sequence
  Amplification primer (reverse)
ggggaccactttgtacaagaaagctgggttcatatgacgcaaacgc

SEQ ID NO: 11684 - DNA, 46 bp, Artificial Sequence
  Amplification primer (reverse)
ggggaccactttgtacaagaaagctgggttagcctcttttcttgtt

SEQ ID NO: 11685 - DNA, 48 bp, Artificial Sequence
  Amplification primer (reverse)
ggggaccactttgtacaagaaagctgggttacgattatcaacaaagtt

SEQ ID NO: 11686 - DNA, 50 bp, Artificial Sequence
  Amplification primer (reverse)
ggggaccactttgtacaagaaagctgggttcattcttttaaatacaaatc

SEQ ID NO: 11687 - DNA, 46 bp, Artificial Sequence
  Amplification primer (reverse)
ggggaccactttgtacaagaaagctgggttgggtttgaaagttttc

SEQ ID NO: 11688 - DNA, 51 bp, Artificial Sequence
  Amplification primer (reverse)
ggggaccactttgtacaagaaagctgggtttttaactttaattactggaat

SEQ ID NO: 11689 - DNA, 48 bp, Artificial Sequence
  Amplification primer (reverse)
ggggaccactttgtacaagaaagctgggttttttttaataagcttcga

SEQ ID NO: 11690 - DNA, 48 bp, Artificial Sequence
  Amplification primer (reverse)
ggggaccactttgtacaagaaagctgggttttttttgtaaacttcctg

SEQ ID NO: 11691 - DNA, 51 bp, Artificial Sequence
  Amplification primer (reverse)
ggggaccactttgtacaagaaagctgggttcttagatacattgtttttttc

SEQ ID NO: 11692 - DNA, 48 bp, Artificial Sequence
  Amplification primer (reverse)
ggggaccactttgtacaagaaagctgggttctttcttttcttacttgc

SEQ ID NO: 11693 - DNA, 52 bp, Artificial Sequence
  Amplification primer (reverse)
ggggaccactttgtacaagaaagctgggtttttattatttttaatacttgaa

SEQ ID NO: 11694 - DNA, 49 bp, Artificial Sequence
  Amplification primer (reverse)
ggggaccactttgtacaagaaagctgggttcttcaactgttgatagagc

SEQ ID NO: 11695 - DNA, 46 bp, Artificial Sequence
  Amplification primer (reverse)
ggggaccactttgtacaagaaagctgggtttcctttagcaggagct

SEQ ID NO: 11696 - DNA, 50 bp, Artificial Sequence
  Amplification primer (reverse)
ggggaccactttgtacaagaaagctgggttgttatacatgttgtctgaag

SEQ ID NO: 11697 - DNA, 48 bp, Artificial Sequence
  Amplification primer (reverse)
ggggaccactttgtacaagaaagctgggttccaaataataacacgttt

SEQ ID NO: 11698 - DNA, 46 bp, Artificial Sequence
  Amplification primer (reverse)
ggggaccactttgtacaagaaagctgggttgctatccctttccaat

SEQ ID NO: 11699 - DNA, 50 bp, Artificial Sequence
  Amplification primer (reverse)
ggggaccactttgtacaagaaagctgggtttgtatttttaatttgttttc

SEQ ID NO: 11700 - DNA, 50 bp, Artificial Sequence; identical to SEQ ID NO: 11699
  Amplification primer (reverse)

SEQ ID NO: 11701 - DNA, 50 bp, Artificial Sequence
  Amplification primer (reverse)
ggggaccactttgtacaagaaagctgggttcaaacttttaacatttaatg

SEQ ID NO: 11702 - DNA, 48 bp, Artificial Sequence
  Amplification primer (reverse)
ggggaccactttgtacaagaaagctgggttatagtgtaagctaccagc

SEQ ID NO: 11703 - DNA, 48 bp, Artificial Sequence
  Amplification primer (reverse)
ggggaccactttgtacaagaaagctgggttgtcatcatattcctgaaa

SEQ ID NO: 11704 - DNA, 46 bp, Artificial Sequence
  Amplification primer (reverse)
ggggaccactttgtacaagaaagctgggtttgttcggcgtaagatt

SEQ ID NO: 11705 - DNA, 47 bp, Artificial Sequence
  Amplification primer (reverse)
ggggaccactttgtacaagaaagctgggttattggtcatttcttgag

SEQ ID NO: 11706 - DNA, 48 bp, Artificial Sequence
  Amplification primer (reverse)
ggggaccactttgtacaagaaagctgggttaacagatttattggttgg

SEQ ID NO: 11707 - DNA, 49 bp, Artificial Sequence
  Amplification primer (reverse)
ggggaccactttgtacaagaaagctgggttagactcatcaactttttct

SEQ ID NO: 11708 - DNA, 46 bp, Artificial Sequence
  Amplification primer (reverse)
ggggaccactttgtacaagaaagctgggttgaaccctgaagggtag

SEQ ID NO: 11709 - DNA, 48 bp, Artificial Sequence
  Amplification primer (reverse)
ggggaccactttgtacaagaaagctgggttccaattgtatttttcaac

SEQ ID NO: 11710 - DNA, 51 bp, Artificial Sequence
  Amplification primer (reverse)
ggggaccactttgtacaagaaagctgggttatttatactacctgttgaatc

SEQ ID NO: 11711 - DNA, 52 bp, Artificial Sequence
  Amplification primer (reverse)
ggggaccactttgtacaagaaagctgggtttttaaatttgtagtctttaata

SEQ ID NO: 11712 - DNA, 49 bp, Artificial Sequence
  Amplification primer (reverse)
ggggaccactttgtacaagaaagctgggttctcttttacttttccaaaa

SEQ ID NO: 11713 - DNA, 46 bp, Artificial Sequence
  Amplification primer (reverse)
ggggaccactttgtacaagaaagctgggttccctcccttaagagaa

SEQ ID NO: 11714 - DNA, 46 bp, Artificial Sequence
  Amplification primer (reverse)
ggggaccactttgtacaagaaagctgggttttgacgatgttgcatc

SEQ ID NO: 11715 - DNA, 48 bp, Artificial Sequence
  Amplification primer (reverse)
ggggaccactttgtacaagaaagctgggtttttcgaattattgtgact

SEQ ID NO: 11716 - DNA, 46 bp, Artificial Sequence
  Amplification primer (reverse)
ggggaccactttgtacaagaaagctgggttgtattgttgttgcctg

SEQ ID NO: 11717 - DNA, 47 bp, Artificial Sequence
  Amplification primer (reverse)
ggggaccactttgtacaagaaagctgggtttttttgatttccctttc

SEQ ID NO: 11718 - DNA, 48 bp, Artificial Sequence
  Amplification primer (reverse)
ggggaccactttgtacaagaaagctgggtttttatagtgtgtttgcaa

SEQ ID NO: 11719 - DNA, 47 bp, Artificial Sequence
  Amplification primer (reverse)
ggggaccactttgtacaagaaagctgggtttttgctaggaactttga

SEQ ID NO: 11720 - DNA, 47 bp, Artificial Sequence
  Amplification primer (reverse)
ggggaccactttgtacaagaaagctgggtttgattcaattccttttc

SEQ ID NO: 11721 - DNA, 49 bp, Artificial Sequence
  Amplification primer (reverse)
ggggaccactttgtacaagaaagctgggtttttttcctctactttctta

SEQ ID NO: 11722 - DNA, 46 bp, Artificial Sequence
  Amplification primer (reverse)
ggggaccactttgtacaagaaagctgggtttttgctcacctccaca

SEQ ID NO: 11723 - DNA, 51 bp, Artificial Sequence
  Amplification primer (reverse)
ggggaccactttgtacaagaaagctgggttcaataacttctgtaaaataaa

SEQ ID NO: 11724 - DNA, 48 bp, Artificial Sequence
  Amplification primer (reverse)
ggggaccactttgtacaagaaagctgggttttcacccttaaaataatt

SEQ ID NO: 11725 - DNA, 46 bp, Artificial Sequence
  Amplification primer (reverse)
ggggaccactttgtacaagaaagctgggtttgcatttttcccttct

SEQ ID NO: 11726 - DNA, 52 bp, Artificial Sequence
  Amplification primer (reverse)
ggggaccactttgtacaagaaagctgggttctccagtaaagtattagtattt

SEQ ID NO: 11727 - DNA, 47 bp, Artificial Sequence
  Amplification primer (reverse)
ggggaccactttgtacaagaaagctgggttgtgaggttttggtaatt

SEQ ID NO: 11728 - DNA, 49 bp, Artificial Sequence
  Amplification primer (reverse)
ggggaccactttgtacaagaaagctgggtttgcatataagttttttagc

SEQ ID NO: 11729 - DNA, 49 bp, Artificial Sequence; identical to SEQ ID NO: 11728
  Amplification primer (reverse)

SEQ ID NO: 11730 - DNA, 49 bp, Artificial Sequence
  Amplification primer (reverse)
ggggaccactttgtacaagaaagctgggttctcatctaaagtgctatcc

SEQ ID NO: 11731 - DNA, 47 bp, Artificial Sequence
  Amplification primer (reverse)
ggggaccactttgtacaagaaagctgggttctcgtatttaggcaact

SEQ ID NO: 11732 - DNA, 47 bp, Artificial Sequence
  Amplification primer (reverse)
ggggaccactttgtacaagaaagctgggttattggatatgccataaa

SEQ ID NO: 11733 - DNA, 50 bp, Artificial Sequence
  Amplification primer (reverse)
ggggaccactttgtacaagaaagctgggttgactttttgatgtttacttt

SEQ ID NO: 11734 - DNA, 52 bp, Artificial Sequence
  Amplification primer (reverse)
ggggaccactttgtacaagaaagctgggttttctttactataaacatcttca

SEQ ID NO: 11735 - DNA, 49 bp, Artificial Sequence
  Amplification primer (reverse)
ggggaccactttgtacaagaaagctgggttagcatttaaagttgaatgt

SEQ ID NO: 11736 - DNA, 49 bp, Artificial Sequence
  Amplification primer (reverse)
ggggaccactttgtacaagaaagctgggttgttagtctcttcaagatca

SEQ ID NO: 11737 - DNA, 46 bp, Artificial Sequence
  Amplification primer (reverse)
ggggaccactttgtacaagaaagctgggttaagacctaccgcccaa

SEQ ID NO: 11738 - DNA, 50 bp, Artificial Sequence
  Amplification primer (reverse)
ggggaccactttgtacaagaaagctgggtttacttctttctctttcaatt

SEQ ID NO: 11739 - DNA, 48 bp, Artificial Sequence
  Amplification primer (reverse)
ggggaccactttgtacaagaaagctgggttcttagtgttccgatatga

SEQ ID NO: 11740 - DNA, 48 bp, Artificial Sequence
  Amplification primer (reverse)
ggggaccactttgtacaagaaagctgggtttcttgttttaagagcaga

SEQ ID NO: 11741 - DNA, 48 bp, Artificial Sequence; identical to SEQ ID NO: 11740
  Amplification primer (reverse)

SEQ ID NO: 11742 - DNA, 47 bp, Artificial Sequence
  Amplification primer (reverse)
ggggaccactttgtacaagaaagctgggttatcatgttttccctcaa

SEQ ID NO: 11743 - DNA, 50 bp, Artificial Sequence
  Amplification primer (reverse)
ggggaccactttgtacaagaaagctgggttatctgatatatccgttttat

SEQ ID NO: 11744 - DNA, 49 bp, Artificial Sequence
  Amplification primer (reverse)
ggggaccactttgtacaagaaagctgggttttttttgtctcctttttta

SEQ ID NO: 11745 - DNA, 50 bp, Artificial Sequence
  Amplification primer (reverse)
ggggaccactttgtacaagaaagctgggttaaagacacgataaacataag

SEQ ID NO: 11746 - DNA, 50 bp, Artificial Sequence; identical to SEQ ID NO: 11745
  Amplification primer (reverse)

SEQ ID NO: 11747 - DNA, 49 bp, Artificial Sequence
  Amplification primer (reverse)
ggggaccactttgtacaagaaagctgggttatttgcaacttcttgtata

SEQ ID NO: 11748 - DNA, 52 bp, Artificial Sequence
  Amplification primer (reverse)
ggggaccactttgtacaagaaagctgggtttttaaaagtatccttaaataag

SEQ ID NO: 11749 - DNA, 48 bp, Artificial Sequence
  Amplification primer (reverse)
ggggaccactttgtacaagaaagctgggttcttcctcctcaatagttg

SEQ ID NO: 11750 - DNA, 46 bp, Artificial Sequence
  Amplification primer (reverse)
ggggaccactttgtacaagaaagctgggttttctcctcccccatta

SEQ ID NO: 11751 - DNA, 47 bp, Artificial Sequence
  Amplification primer (reverse)
ggggaccactttgtacaagaaagctgggttatccaaacgagtgaaat

SEQ ID NO: 11752 - DNA, 48 bp, Artificial Sequence
  Amplification primer (reverse)
ggggaccactttgtacaagaaagctgggttaggtgttgttgtattttc

SEQ ID NO: 11753 - DNA, 52 bp, Artificial Sequence
  Amplification primer (reverse)
ggggaccactttgtacaagaaagctgggttctttctaagtttattaaacata

SEQ ID NO: 11754 - DNA, 46 bp, Artificial Sequence
  Amplification primer (reverse)
ggggaccactttgtacaagaaagctgggttggcatctgttaccttg

SEQ ID NO: 11755 - DNA, 49 bp, Artificial Sequence
  Amplification primer (reverse)
ggggaccactttgtacaagaaagctgggttaaacaactccattattttt

SEQ ID NO: 11756 - DNA, 47 bp, Artificial Sequence
  Amplification primer (reverse)
ggggaccactttgtacaagaaagctgggtttaaacgttgaagagcat

SEQ ID NO: 11757 - DNA, 52 bp, Artificial Sequence
  Amplification primer (reverse)
ggggaccactttgtacaagaaagctgggttcttatcatatcttgttaaatca

SEQ ID NO: 11758 - DNA, 52 bp, Artificial Sequence; identical to SEQ ID NO: 11757
  Amplification primer (reverse)

SEQ ID NO: 11759 - DNA, 46 bp, Artificial Sequence
  Amplification primer (reverse)
ggggaccactttgtacaagaaagctgggttttgccatgggttatag

SEQ ID NO: 11760 - DNA, 49 bp, Artificial Sequence
  Amplification primer (reverse)
ggggaccactttgtacaagaaagctgggttagaattaaaattttcatgc

SEQ ID NO: 11761 - DNA, 49 bp, Artificial Sequence; identical to SEQ ID NO: 11760
  Amplification primer (reverse)

SEQ ID NO: 11762 - DNA, 50 bp, Artificial Sequence
  Amplification primer (reverse)
ggggaccactttgtacaagaaagctgggttttttttagatgttttatgtg

SEQ ID NO: 11763 - DNA, 49 bp, Artificial Sequence
  Amplification primer (reverse)
ggggaccactttgtacaagaaagctgggttctcttttactttagcttca

SEQ ID NO: 11764 - DNA, 46 bp, Artificial Sequence
  Amplification primer (reverse)
ggggaccactttgtacaagaaagctgggtttttcaaactccagcca

SEQ ID NO: 11765 - DNA, 46 bp, Artificial Sequence
  Amplification primer (reverse)
ggggaccactttgtacaagaaagctgggttggagtgcctttctact

SEQ ID NO: 11766 - DNA, 48 bp, Artificial Sequence
  Amplification primer (reverse)
ggggaccactttgtacaagaaagctgggttttcatatcgtaaagcatc

SEQ ID NO: 11767 - DNA, 46 bp, Artificial Sequence
  Amplification primer (reverse)
ggggaccactttgtacaagaaagctgggttatcgtcaaccttaacg

SEQ ID NO: 11768 - DNA, 48 bp, Artificial Sequence
  Amplification primer (reverse)
ggggaccactttgtacaagaaagctgggttttttacttgacgtctcac

SEQ ID NO: 11769 - DNA, 49 bp, Artificial Sequence
  Amplification primer (reverse)
ggggaccactttgtacaagaaagctgggttgtcttccattaatattccc

SEQ ID NO: 11770 - DNA, 49 bp, Artificial Sequence
  Amplification primer (reverse)
ggggaccactttgtacaagaaagctgggttccaattattttgaaagttc

SEQ ID NO: 11771 - DNA, 52 bp, Artificial Sequence
  Amplification primer (reverse)
ggggaccactttgtacaagaaagctgggttatttttttgaataatataatcc

SEQ ID NO: 11772 - DNA, 48 bp, Artificial Sequence
  Amplification primer (reverse)
ggggaccactttgtacaagaaagctgggtttttattatcagaaaaggc

SEQ ID NO: 11773 - DNA, 48 bp, Artificial Sequence
  Amplification primer (reverse)
ggggaccactttgtacaagaaagctgggttattcaaaaaatttttcaa

SEQ ID NO: 11774 - DNA, 46 bp, Artificial Sequence
  Amplification primer (reverse)
ggggaccactttgtacaagaaagctgggttcgaaacgtcaggtaaa

SEQ ID NO: 11775 - DNA, 53 bp, Artificial Sequence
  Amplification primer (reverse)
ggggaccactttgtacaagaaagctgggttacttatttttgataatatttctt

SEQ ID NO: 11776 - DNA, 47 bp, Artificial Sequence
  Amplification primer (reverse)
ggggaccactttgtacaagaaagctgggttatcagcatttctacgaa

SEQ ID NO: 11777 - DNA, 50 bp, Artificial Sequence
  Amplification primer (reverse)
ggggaccactttgtacaagaaagctgggttatgtagactcctaatgattt

SEQ ID NO: 11778 - DNA, 47 bp, Artificial Sequence
  Amplification primer (reverse)
ggggaccactttgtacaagaaagctgggtttttactgttcctttcgc

SEQ ID NO: 11779 - DNA, 52 bp, Artificial Sequence
  Amplification primer (reverse)
ggggaccactttgtacaagaaagctgggttgagattaatttgattatatttt

SEQ ID NO: 11780 - DNA, 46 bp, Artificial Sequence
  Amplification primer (reverse)
ggggaccactttgtacaagaaagctgggttaacatcatttcctccc

SEQ ID NO: 11781 - DNA, 48 bp, Artificial Sequence
  Amplification primer (reverse)
ggggaccactttgtacaagaaagctgggttgttgatagttccaaaacg

SEQ ID NO: 11782 - DNA, 51 bp, Artificial Sequence
  Amplification primer (reverse)
ggggaccactttgtacaagaaagctgggtttaaatgtgttcctactaaatt

SEQ ID NO: 11783 - DNA, 47 bp, Artificial Sequence
  Amplification primer (reverse)
ggggaccactttgtacaagaaagctgggttcatcaatagccgagctg

SEQ ID NO: 11784 - DNA, 48 bp, Artificial Sequence
  Amplification primer (reverse)
ggggaccactttgtacaagaaagctgggtttttattttccaaatgaca

SEQ ID NO: 11785 - DNA, 47 bp, Artificial Sequence
  Amplification primer (reverse)
ggggaccactttgtacaagaaagctgggttttcactcggagttggag

SEQ ID NO: 11786 - DNA, 47 bp, Artificial Sequence; identical to SEQ ID NO: 11785
  Amplification primer (reverse)

SEQ ID NO: 11787 - DNA, 49 bp, Artificial Sequence
  Amplification primer (reverse)
ggggaccactttgtacaagaaagctgggttaatgtaaatgacaaaggta

SEQ ID NO: 11788 - DNA, 47 bp, Artificial Sequence
  Amplification primer (reverse)
ggggaccactttgtacaagaaagctgggttgttttttaatggtttgc

SEQ ID NO: 11789 - DNA, 50 bp, Artificial Sequence
  Amplification primer (reverse)
ggggaccactttgtacaagaaagctgggtttttatcataagcatctagac

SEQ ID NO: 11790 - DNA, 48 bp, Artificial Sequence
  Amplification primer (reverse)
ggggaccactttgtacaagaaagctgggttctgatctcttgttgatgc

SEQ ID NO: 11791 - DNA, 46 bp, Artificial Sequence
  Amplification primer (reverse)
ggggaccactttgtacaagaaagctgggttaagcaggggagcaata

SEQ ID NO: 11792 - DNA, 46 bp, Artificial Sequence; identical to SEQ ID NO: 11791
  Amplification primer (reverse)

SEQ ID NO: 11793 - DNA, 46 bp, Artificial Sequence
  Amplification primer (reverse)
ggggaccactttgtacaagaaagctgggttctgagcaacacctgtc

SEQ ID NO: 11794 - DNA, 46 bp, Artificial Sequence
  Amplification primer (reverse)
ggggaccactttgtacaagaaagctgggttggcaattttgtggcaa

SEQ ID NO: 11795 - DNA, 47 bp, Artificial Sequence
  Amplification primer (reverse)
ggggaccactttgtacaagaaagctgggttttgcttagttaatggct

SEQ ID NO: 11796 - DNA, 48 bp, Artificial Sequence
  Amplification primer (reverse)
ggggaccactttgtacaagaaagctgggttaggcgttgaatataattc

SEQ ID NO: 11797 - DNA, 48 bp, Artificial Sequence; identical to SEQ ID NO: 11796
  Amplification primer (reverse)

SEQ ID NO: 11798 - DNA, 47 bp, Artificial Sequence
  Amplification primer (reverse)
ggggaccactttgtacaagaaagctgggttcttttcaactccaaaca

SEQ ID NO: 11799 - DNA, 48 bp, Artificial Sequence
  Amplification primer (reverse)
ggggaccactttgtacaagaaagctgggttgagttgtctttttttgtc

SEQ ID NO: 11800 - DNA, 47 bp, Artificial Sequence
  Amplification primer (reverse)
ggggaccactttgtacaagaaagctgggttgcaatcacaattgacat

SEQ ID NO: 11801 - DNA, 47 bp, Artificial Sequence
  Amplification primer (reverse)
ggggaccactttgtacaagaaagctgggttctttgtctgcttcactt

SEQ ID NO: 11802 - DNA, 48 bp, Artificial Sequence
  Amplification primer (reverse)
ggggaccactttgtacaagaaagctgggttttgtatcttctcctgacc

SEQ ID NO: 11803 - DNA, 46 bp, Artificial Sequence
  Amplification primer (reverse)
ggggaccactttgtacaagaaagctgggttttggttaatcgtcttg

SEQ ID NO: 11804 - DNA, 46 bp, Artificial Sequence; identical to SEQ ID NO: 11803
  Amplification primer (reverse)

SEQ ID NO: 11805 - DNA, 51 bp, Artificial Sequence
  Amplification primer (reverse)
ggggaccactttgtacaagaaagctgggtttttagttactttcataaatgg

SEQ ID NO: 11806 - DNA, 51 bp, Artificial Sequence; identical to SEQ ID NO: 11805
  Amplification primer (reverse)

SEQ ID NO: 11807 - DNA, 52 bp, Artificial Sequence
  Amplification primer (reverse)
ggggaccactttgtacaagaaagctgggttatataattcctctaaaactagc

SEQ ID NO: 11808 - DNA, 49 bp, Artificial Sequence
  Amplification primer (reverse)
ggggaccactttgtacaagaaagctgggttccacttcaaattaactaac

SEQ ID NO: 11809 - DNA, 46 bp, Artificial Sequence
  Amplification primer (reverse)
ggggaccactttgtacaagaaagctgggttattccttgaacacgaa

SEQ ID NO: 11810 - DNA, 46 bp, Artificial Sequence
  Amplification primer (reverse)
ggggaccactttgtacaagaaagctgggttgtgccattcattctct

SEQ ID NO: 11811 - DNA, 47 bp, Artificial Sequence
  Amplification primer (reverse)
ggggaccactttgtacaagaaagctgggttttgtcctgtgaactgtg

SEQ ID NO: 11812 - DNA, 48 bp, Artificial Sequence
  Amplification primer (reverse)
ggggaccactttgtacaagaaagctgggttagggtttatttgttgaag

SEQ ID NO: 11813 - DNA, 47 bp, Artificial Sequence
  Amplification primer (reverse)
ggggaccactttgtacaagaaagctgggtttcctgatttatccactg

SEQ ID NO: 11814 - DNA, 48 bp, Artificial Sequence; identical to SEQ ID NO: 11812
  Amplification primer (reverse)

SEQ ID NO: 11815 - DNA, 48 bp, Artificial Sequence
  Amplification primer (reverse)
ggggaccactttgtacaagaaagctgggttcaaaatacctaagctagc

SEQ ID NO: 11816 - DNA, 46 bp, Artificial Sequence
  Amplification primer (reverse)
ggggaccactttgtacaagaaagctgggttacgaacttccataacc

SEQ ID NO: 11817 - DNA, 46 bp, Artificial Sequence
  Amplification primer (reverse)
ggggaccactttgtacaagaaagctgggttggcttctccaatcaaa

SEQ ID NO: 11818 - DNA, 48 bp, Artificial Sequence
  Amplification primer (reverse)
ggggaccactttgtacaagaaagctgggttttgagttaatggattgtt

SEQ ID NO: 11819 - DNA, 48 bp, Artificial Sequence
  Amplification primer (reverse)
ggggaccactttgtacaagaaagctgggtttagcgttatttcactgtg

SEQ ID NO: 11820 - DNA, 46 bp, Artificial Sequence
  Amplification primer (reverse)
ggggaccactttgtacaagaaagctgggtttttctccgcccagtca

SEQ ID NO: 11821 - DNA, 49 bp, Artificial Sequence
  Amplification primer (reverse)
ggggaccactttgtacaagaaagctgggttccgtttattctttctactg

SEQ ID NO: 11822 - DNA, 48 bp, Artificial Sequence
  Amplification primer (reverse)
ggggaccactttgtacaagaaagctgggttcatatctgttgcatcaat

SEQ ID NO: 11823 - DNA, 48 bp, Artificial Sequence
  Amplification primer (reverse)
ggggaccactttgtacaagaaagctgggttaactggctttttagtcag

SEQ ID NO: 11824 - DNA, 52 bp, Artificial Sequence
  Amplification primer (reverse)
ggggaccactttgtacaagaaagctgggtttttattatttaattcttcaata

SEQ ID NO: 11825 - DNA, 47 bp, Artificial Sequence
  Amplification primer (reverse)
ggggaccactttgtacaagaaagctgggttgtcttttagagcatcga

SEQ ID NO: 11826 - DNA, 49 bp, Artificial Sequence
  Amplification primer (reverse)
ggggaccactttgtacaagaaagctgggttctctcctctaagactttcg

SEQ ID NO: 11827 - DNA, 48 bp, Artificial Sequence
  Amplification primer (reverse)
ggggaccactttgtacaagaaagctgggtttccttttgttacttttgc

SEQ ID NO: 11828 - DNA, 46 bp, Artificial Sequence
  Amplification primer (reverse)
ggggaccactttgtacaagaaagctgggtttttatcgcctttgttg

SEQ ID NO: 11829 - DNA, 46 bp, Artificial Sequence
  Amplification primer (reverse)
ggggaccactttgtacaagaaagctgggttatgttcaggttctccg

SEQ ID NO: 11830 - DNA, 49 bp, Artificial Sequence
  Amplification primer (reverse)
ggggaccactttgtacaagaaagctgggttttccattatcttcaagtta

SEQ ID NO: 11831 - DNA, 49 bp, Artificial Sequence
  Amplification primer (reverse)
ggggaccactttgtacaagaaagctgggttctcttcttcatttttctta

SEQ ID NO: 11832 - DNA, 50 bp, Artificial Sequence
  Amplification primer (reverse)
ggggaccactttgtacaagaaagctgggtttttttttaagttgtagaatg

SEQ ID NO: 11833 - DNA, 48 bp, Artificial Sequence
  Amplification primer (reverse)
ggggaccactttgtacaagaaagctgggttgttttttgatgcttcttg

SEQ ID NO: 11834 - DNA, 48 bp, Artificial Sequence
  Amplification primer (reverse)
ggggaccactttgtacaagaaagctgggtttttactactttggttggc

SEQ ID NO: 11835 - DNA, 47 bp, Artificial Sequence
  Amplification primer (reverse)
ggggaccactttgtacaagaaagctgggttgtgtgtcattttgacct

SEQ ID NO: 11836 - DNA, 48 bp, Artificial Sequence
  Amplification primer (reverse)
ggggaccactttgtacaagaaagctgggtttccttcaagatcatttaa

SEQ ID NO: 11837 - DNA, 48 bp, Artificial Sequence
  Amplification primer (reverse)
ggggaccactttgtacaagaaagctgggttacctccttttctttcatt

SEQ ID NO: 11838 - DNA, 49 bp, Artificial Sequence
  Amplification primer (reverse)
ggggaccactttgtacaagaaagctgggttatcttctcctaacttaccc

SEQ ID NO: 11839 - DNA, 50 bp, Artificial Sequence
  Amplification primer (reverse)
ggggaccactttgtacaagaaagctgggttactagctagattcttaacgc

SEQ ID NO: 11840 - DNA, 49 bp, Artificial Sequence; identical to SEQ ID NO: 11838
  Amplification primer (reverse)

SEQ ID NO: 11841 - DNA, 46 bp, Artificial Sequence
  Amplification primer (reverse)
ggggaccactttgtacaagaaagctgggttgcctctttctccaaat

SEQ ID NO: 11842 - DNA, 50 bp, Artificial Sequence
  Amplification primer (reverse)
ggggaccactttgtacaagaaagctgggttatgtcctgttatatcttctt

SEQ ID NO: 11843 - DNA, 46 bp, Artificial Sequence
  Amplification primer (reverse)
ggggaccactttgtacaagaaagctgggttgcgttgaataatggtt

SEQ ID NO: 11844 - DNA, 50 bp, Artificial Sequence
  Amplification primer (reverse)
ggggaccactttgtacaagaaagctgggtttatttctttagtttcttcaa

SEQ ID NO: 11845 - DNA, 53 bp, Artificial Sequence
  Amplification primer (reverse)
ggggaccactttgtacaagaaagctgggtttaataaaaattatataagaacct

SEQ ID NO: 11846 - DNA, 50 bp, Artificial Sequence
  Amplification primer (reverse)
ggggaccactttgtacaagaaagctgggttttctgtcttataagcataag

SEQ ID NO: 11847 - DNA, 49 bp, Artificial Sequence
  Amplification primer (reverse)
ggggaccactttgtacaagaaagctgggttttttttataagcatgtgta

SEQ ID NO: 11848 - DNA, 48 bp, Artificial Sequence
  Amplification primer (reverse)
ggggaccactttgtacaagaaagctgggttatgagacataaggtcttg

SEQ ID NO: 11849 - DNA, 46 bp, Artificial Sequence
  Amplification primer (reverse)
ggggaccactttgtacaagaaagctgggttgttggagctcctactg

SEQ ID NO: 11850 - DNA, 46 bp, Artificial Sequence; identical to SEQ ID NO: 11849
  Amplification primer (reverse)

SEQ ID NO: 11851 - DNA, 48 bp, Artificial Sequence
  Amplification primer (reverse)
ggggaccactttgtacaagaaagctgggttcatttctttggttaaagc

SEQ ID NO: 11852 - DNA, 48 bp, Artificial Sequence
  Amplification primer (reverse)
ggggaccactttgtacaagaaagctgggtttatctcgagtgctatttg

SEQ ID NO: 11853 - DNA, 49 bp, Artificial Sequence
  Amplification primer (reverse)
ggggaccactttgtacaagaaagctgggttctcttcatcgacatagtaa

SEQ ID NO: 11854 - DNA, 48 bp, Artificial Sequence; identical to SEQ ID NO: 11852
  Amplification primer (reverse)

SEQ ID NO: 11855 - DNA, 50 bp, Artificial Sequence
  Amplification primer (reverse)
ggggaccactttgtacaagaaagctgggttattttacagtagtggagttt

SEQ ID NO: 11856 - DNA, 46 bp, Artificial Sequence
  Amplification primer (reverse)
ggggaccactttgtacaagaaagctgggtttgtcctcattttttca

SEQ ID NO: 11857 - DNA, 48 bp, Artificial Sequence
  Amplification primer (reverse)
ggggaccactttgtacaagaaagctgggtttttaacagtacgaacacg

SEQ ID NO: 11858 - DNA, 47 bp, Artificial Sequence
  Amplification primer (reverse)
ggggaccactttgtacaagaaagctgggttccccctgtttttaaaat

SEQ ID NO: 11859 - DNA, 46 bp, Artificial Sequence
  Amplification primer (reverse)
ggggaccactttgtacaagaaagctgggttaccctcatatgattcc

SEQ ID NO: 11860 - DNA, 51 bp, Artificial Sequence
  Amplification primer (reverse)
ggggaccactttgtacaagaaagctgggtttttaaaataatgatacatctc

SEQ ID NO: 11861 - DNA, 51 bp, Artificial Sequence; identical to SEQ ID NO: 11860
  Amplification primer (reverse)

SEQ ID NO: 11862 - DNA, 46 bp, Artificial Sequence
  Amplification primer (reverse)
ggggaccactttgtacaagaaagctgggtttaaccccgtctcaaca

SEQ ID NO: 11863 - DNA, 48 bp, Artificial Sequence
  Amplification primer (reverse)
ggggaccactttgtacaagaaagctgggtttattttcgttttctcaaa

SEQ ID NO: 11864 - DNA, 49 bp, Artificial Sequence
  Amplification primer (reverse)
ggggaccactttgtacaagaaagctgggtttttctccaaataatctctc

SEQ ID NO: 11865 - DNA, 51 bp, Artificial Sequence
  Amplification primer (reverse)
ggggaccactttgtacaagaaagctgggttcctacttttagttttagaaga

SEQ ID NO: 11866 - DNA, 46 bp, Artificial Sequence
  Amplification primer (reverse)
ggggaccactttgtacaagaaagctgggttgaaatcatagcttccc

SEQ ID NO: 11867 - DNA, 49 bp, Artificial Sequence
  Amplification primer (reverse)
ggggaccactttgtacaagaaagctgggttaccttttacttttggtagt

SEQ ID NO: 11868 - DNA, 49 bp, Artificial Sequence; identical to SEQ ID NO: 11867
  Amplification primer (reverse)

SEQ ID NO: 11869 - DNA, 49 bp, Artificial Sequence
  Amplification primer (reverse)
ggggaccactttgtacaagaaagctgggttttgtttgtgaagtaaaacg

SEQ ID NO: 11870 - DNA, 50 bp, Artificial Sequence
  Amplification primer (reverse)
ggggaccactttgtacaagaaagctgggtttaatttaaaaattgcataaa

SEQ ID NO: 11871 - DNA, 49 bp, Artificial Sequence
  Amplification primer (reverse)
ggggaccactttgtacaagaaagctgggtttttcgttaccatatctaga

SEQ ID NO: 11872 - DNA, 48 bp, Artificial Sequence
  Amplification primer (reverse)
ggggaccactttgtacaagaaagctgggtttaaatcatggaaactagc

SEQ ID NO: 11873 - DNA, 46 bp, Artificial Sequence
  Amplification primer (reverse)
ggggaccactttgtacaagaaagctgggttaaagcccaaccttccg

SEQ ID NO: 11874 - DNA, 46 bp, Artificial Sequence
  Amplification primer (reverse)
ggggaccactttgtacaagaaagctgggttgtttccacgtcctttc

SEQ ID NO: 11875 - DNA, 48 bp, Artificial Sequence
  Amplification primer (reverse)
ggggaccactttgtacaagaaagctgggttaagtttattcaaatctgg

SEQ ID NO: 11876 - DNA, 50 bp, Artificial Sequence
  Amplification primer (reverse)
ggggaccactttgtacaagaaagctgggttaatgtaatggttttttaata

SEQ ID NO: 11877 - DNA, 49 bp, Artificial Sequence
  Amplification primer (reverse)
ggggaccactttgtacaagaaagctgggttagctaaaatacctaaccag

SEQ ID NO: 11878 - DNA, 48 bp, Artificial Sequence
  Amplification primer (reverse)
ggggaccactttgtacaagaaagctgggttattttttaaacgactcat

SEQ ID NO: 11879 - DNA, 46 bp, Artificial Sequence
  Amplification primer (reverse)
ggggaccactttgtacaagaaagctgggttagcggaacggtgaata

SEQ ID NO: 11880 - DNA, 51 bp, Artificial Sequence
  Amplification primer (reverse)
ggggaccactttgtacaagaaagctgggttataatctaaactatcagctct

SEQ ID NO: 11881 - DNA, 50 bp, Artificial Sequence
  Amplification primer (reverse)
ggggaccactttgtacaagaaagctgggttatctcctattgtaattttga

SEQ ID NO: 11882 - DNA, 50 bp, Artificial Sequence; identical to SEQ ID NO: 11881
  Amplification primer (reverse)

SEQ ID NO: 11883 - DNA, 46 bp, Artificial Sequence
  Amplification primer (reverse)
ggggaccactttgtacaagaaagctgggttcacctcttttgtcaga

SEQ ID NO: 11884 - DNA, 48 bp, Artificial Sequence
  Amplification primer (reverse)
ggggaccactttgtacaagaaagctgggtttttgttagcgagtaagtc

SEQ ID NO: 11885 - DNA, 50 bp, Artificial Sequence
  Amplification primer (reverse)
ggggaccactttgtacaagaaagctgggtttttatcatcctccttaataa

SEQ ID NO: 11886 - DNA, 50 bp, Artificial Sequence
  Amplification primer (reverse)
ggggaccactttgtacaagaaagctgggttaaacgttttactctgtaaaa

SEQ ID NO: 11887 - DNA, 51 bp, Artificial Sequence
  Amplification primer (reverse)
ggggaccactttgtacaagaaagctgggttaaataagaatgttaaaagagc

SEQ ID NO: 11888 - DNA, 46 bp, Artificial Sequence
  Amplification primer (reverse)
ggggaccactttgtacaagaaagctgggttttccccaaaaatttct

SEQ ID NO: 11889 - DNA, 46 bp, Artificial Sequence
  Amplification primer (reverse)
ggggaccactttgtacaagaaagctgggttacgcagtcccattttc

SEQ ID NO: 11890 - DNA, 46 bp, Artificial Sequence
  Amplification primer (reverse)
ggggaccactttgtacaagaaagctgggttctggcatgaggtctca

SEQ ID NO: 11891 - DNA, 48 bp, Artificial Sequence
  Amplification primer (reverse)
ggggaccactttgtacaagaaagctgggttccttttttcaataatagc

SEQ ID NO: 11892 - DNA, 49 bp, Artificial Sequence
  Amplification primer (reverse)
ggggaccactttgtacaagaaagctgggttatctttaatcttaccatcc

SEQ ID NO: 11893 - DNA, 46 bp, Artificial Sequence
  Amplification primer (reverse)
ggggaccactttgtacaagaaagctgggtttgctgctactgcaatg

SEQ ID NO: 11894 - DNA, 49 bp, Artificial Sequence; identical to SEQ ID NO: 11892
  Amplification primer (reverse)

SEQ ID NO: 11895 - DNA, 50 bp, Artificial Sequence
  Amplification primer (reverse)
ggggaccactttgtacaagaaagctgggtttaaattcctttgttgtaata

SEQ ID NO: 11896 - DNA, 46 bp, Artificial Sequence
  Amplification primer (reverse)
ggggaccactttgtacaagaaagctgggttaccatcagttgtcacc

SEQ ID NO: 11897 - DNA, 46 bp, Artificial Sequence
  Amplification primer (reverse)
ggggaccactttgtacaagaaagctgggtttattgaccagtgcacg

SEQ ID NO: 11898 - DNA, 50 bp, Artificial Sequence
  Amplification primer (reverse)
ggggaccactttgtacaagaaagctgggtttttttttgaatttgtaaaag

SEQ ID NO: 11899 - DNA, 52 bp, Artificial Sequence
  Amplification primer (reverse)
ggggaccactttgtacaagaaagctgggttagagattatttttattttaaat

SEQ ID NO: 11900 - DNA, 52 bp, Artificial Sequence
  Amplification primer (reverse)
ggggaccactttgtacaagaaagctgggtttttatttttagtatctaaaacg

SEQ ID NO: 11901 - DNA, 51 bp, Artificial Sequence
  Amplification primer (reverse)
ggggaccactttgtacaagaaagctgggtttttagaaactccaagtatctc

SEQ ID NO: 11902 - DNA, 53 bp, Artificial Sequence
  Amplification primer (reverse)
ggggaccactttgtacaagaaagctgggttgttaatttgactattgatatatt

SEQ ID NO: 11903 - DNA, 50 bp, Artificial Sequence
  Amplification primer (reverse)
ggggaccactttgtacaagaaagctgggtttaaactctcaaaagctaaac

SEQ ID NO: 11904 - DNA, 46 bp, Artificial Sequence
  Amplification primer (reverse)
ggggaccactttgtacaagaaagctgggttacgttcttctctggct

SEQ ID NO: 11905 - DNA, 47 bp, Artificial Sequence
  Amplification primer (reverse)
ggggaccactttgtacaagaaagctgggttacttaaatggaacaacc

SEQ ID NO: 11906 - DNA, 48 bp, Artificial Sequence
  Amplification primer (reverse)
ggggaccactttgtacaagaaagctgggtttttgcctaaaaaattagg

SEQ ID NO: 11907 - DNA, 46 bp, Artificial Sequence
  Amplification primer (reverse)
ggggaccactttgtacaagaaagctgggttggctttcctcccttca

SEQ ID NO: 11908 - DNA, 49 bp, Artificial Sequence
  Amplification primer (reverse)
ggggaccactttgtacaagaaagctgggttttcatctttttcaatatca

SEQ ID NO: 11909 - DNA, 48 bp, Artificial Sequence
  Amplification primer (reverse)
ggggaccactttgtacaagaaagctgggttgtgagagtgtctttgttt

SEQ ID NO: 11910 - DNA, 50 bp, Artificial Sequence
  Amplification primer (reverse)
ggggaccactttgtacaagaaagctgggttcagatttttagctacttgtc

SEQ ID NO: 11911 - DNA, 48 bp, Artificial Sequence
  Amplification primer (reverse)
ggggaccactttgtacaagaaagctgggtttctagagcgctttataag

SEQ ID NO: 11912 - DNA, 50 bp, Artificial Sequence
  Amplification primer (reverse)
ggggaccactttgtacaagaaagctgggttttttctaatagttagaagcc

SEQ ID NO: 11913 - DNA, 47 bp, Artificial Sequence
  Amplification primer (reverse)
ggggaccactttgtacaagaaagctgggttttttaaatgtgcagaga

SEQ ID NO: 11914 - DNA, 48 bp, Artificial Sequence
  Amplification primer (reverse)
ggggaccactttgtacaagaaagctgggttatttataatttccttggg

SEQ ID NO: 11915 - DNA, 53 bp, Artificial Sequence
  Amplification primer (reverse)
ggggaccactttgtacaagaaagctgggtttctataatatctctctaaagtga

SEQ ID NO: 11916 - DNA, 47 bp, Artificial Sequence
  Amplification primer (reverse)
ggggaccactttgtacaagaaagctgggttcctcgctaacatatcac

SEQ ID NO: 11917 - DNA, 47 bp, Artificial Sequence
  Amplification primer (reverse)
ggggaccactttgtacaagaaagctgggttagctcttacagtcttgc

SEQ ID NO: 11918 - DNA, 46 bp, Artificial Sequence
  Amplification primer (reverse)
ggggaccactttgtacaagaaagctgggttttgtctgagtgaccaa

SEQ ID NO: 11919 - DNA, 52 bp, Artificial Sequence
  Amplification primer (reverse)
ggggaccactttgtacaagaaagctgggttataatatgaaatatgttgttca

SEQ ID NO: 11920 - DNA, 46 bp, Artificial Sequence
  Amplification primer (reverse)
ggggaccactttgtacaagaaagctgggtttccgcagagtaaaaaa

SEQ ID NO: 11921 - DNA, 46 bp, Artificial Sequence
  Amplification primer (reverse)
ggggaccactttgtacaagaaagctgggttttcataaatgtgccaa

SEQ ID NO: 11922 - DNA, 46 bp, Artificial Sequence
  Amplification primer (reverse)
ggggaccactttgtacaagaaagctgggttttcatctctgctcacc

SEQ ID NO: 11923 - DNA, 47 bp, Artificial Sequence
  Amplification primer (reverse)
ggggaccactttgtacaagaaagctgggttttctccttcagctttta

SEQ ID NO: 11924 - DNA, 50 bp, Artificial Sequence
  Amplification primer (reverse)
ggggaccactttgtacaagaaagctgggttgtcattttttctaaagtttg

SEQ ID NO: 11925 - DNA, 49 bp, Artificial Sequence
  Amplification primer (reverse)
ggggaccactttgtacaagaaagctgggtttttttgtagttgtttcaat

SEQ ID NO: 11926 - DNA, 52 bp, Artificial Sequence
  Amplification primer (reverse)
ggggaccactttgtacaagaaagctgggtttttcattagataactattcagc

SEQ ID NO: 11927 - DNA, 54 bp, Artificial Sequence
  Amplification primer (reverse)
ggggaccactttgtacaagaaagctgggtttatagactgaagataattaattaa

SEQ ID NO: 11928 - DNA, 48 bp, Artificial Sequence
  Amplification primer (reverse)
ggggaccactttgtacaagaaagctgggttaaatcgattaatcaagtc

SEQ ID NO: 11929 - DNA, 52 bp, Artificial Sequence
  Amplification primer (reverse)
ggggaccactttgtacaagaaagctgggtttctaaagtagtcctttagacta

SEQ ID NO: 11930 - DNA, 52 bp, Artificial Sequence; identical to SEQ ID NO: 11929
  Amplification primer (reverse)

SEQ ID NO: 11931 - DNA, 48 bp, Artificial Sequence
  Amplification primer (reverse)
ggggaccactttgtacaagaaagctgggtttttgtccataatcatttc

SEQ ID NO: 11932 - DNA, 49 bp, Artificial Sequence
  Amplification primer (reverse)
ggggaccactttgtacaagaaagctgggttggtagatatgcctaacatt

SEQ ID NO: 11933 - DNA, 46 bp, Artificial Sequence
  Amplification primer (reverse)
ggggaccactttgtacaagaaagctgggttgtttccttccaaaaaa

SEQ ID NO: 11934 - DNA, 46 bp, Artificial Sequence
  Amplification primer (reverse)
ggggaccactttgtacaagaaagctgggtttccatgcttaatagcc

SEQ ID NO: 11935 - DNA, 50 bp, Artificial Sequence
  Amplification primer (reverse)
ggggaccactttgtacaagaaagctgggttatctaaaccaatttctgtac

SEQ ID NO: 11936 - DNA, 46 bp, Artificial Sequence
  Amplification primer (reverse)
ggggaccactttgtacaagaaagctgggttgtccacaaaaacgtct

SEQ ID NO: 11937 - DNA, 48 bp, Artificial Sequence
  Amplification primer (reverse)
ggggaccactttgtacaagaaagctgggtttagatgttctacggagaa

SEQ ID NO: 11938 - DNA, 46 bp, Artificial Sequence
  Amplification primer (reverse)
ggggaccactttgtacaagaaagctgggttaaagatggcaagccat

SEQ ID NO: 11939 - DNA, 47 bp, Artificial Sequence
  Amplification primer (reverse)
ggggaccactttgtacaagaaagctgggtttctctctccacaccata

SEQ ID NO: 11940 - DNA, 46 bp, Artificial Sequence
  Amplification primer (reverse)
ggggaccactttgtacaagaaagctgggttcttacctcctgtggct

SEQ ID NO: 11941 - DNA, 47 bp, Artificial Sequence
  Amplification primer (reverse)
ggggaccactttgtacaagaaagctgggttcttttgttggttacctc

SEQ ID NO: 11942 - DNA, 52 bp, Artificial Sequence
  Amplification primer (reverse)
ggggaccactttgtacaagaaagctgggtttattgttaaatatgatgaaatg

SEQ ID NO: 11943 - DNA, 52 bp, Artificial Sequence
  Amplification primer (reverse)
ggggaccactttgtacaagaaagctgggttatgattatacaaattgattaat

SEQ ID NO: 11944 - DNA, 52 bp, Artificial Sequence; identical to SEQ ID NO: 11943
  Amplification primer (reverse)

SEQ ID NO: 11945 - DNA, 46 bp, Artificial Sequence
  Amplification primer (reverse)
ggggaccactttgtacaagaaagctgggtttccctcttccttgaca

SEQ ID NO: 11946 - DNA, 46 bp, Artificial Sequence
  Amplification primer (reverse)
ggggaccactttgtacaagaaagctgggttaacgtttttgagcttt

SEQ ID NO: 11947 - DNA, 48 bp, Artificial Sequence
  Amplification primer (reverse)
ggggaccactttgtacaagaaagctgggttttttgtcttaaacgttct

SEQ ID NO: 11948 - DNA, 50 bp, Artificial Sequence
  Amplification primer (reverse)
ggggaccactttgtacaagaaagctgggtttttagatagtctagccattt

SEQ ID NO: 11949 - DNA, 46 bp, Artificial Sequence
  Amplification primer (reverse)
ggggaccactttgtacaagaaagctgggttacggcttggggcagag

SEQ ID NO: 11950 - DNA, 46 bp, Amplification primer (reverse)
ggggaccactttgtacaagaaagctgggtttaccattatccgtgct

SEQ ID NO: 11951 - DNA, 50 bp, Artificial Sequence
  Amplification primer (reverse)
ggggaccactttgtacaagaaagctgggttactattaaactccaatgtta

SEQ ID NO: 11952 - DNA, 46 bp, Artificial Sequence
  Amplification primer (reverse)
ggggaccactttgtacaagaaagctgggttgcgcattgtaacaaat

SEQ ID NO: 11953 - DNA, 47 bp, Artificial Sequence
  Amplification primer (reverse)
ggggaccactttgtacaagaaagctgggttttttggtaaaaggtctg

SEQ ID NO: 11954 - DNA, 46 bp, Artificial Sequence
  Amplification primer (reverse)
ggggaccactttgtacaagaaagctgggtttcctggaaagttcatc

SEQ ID NO: 11955 - DNA, 49 bp, Artificial Sequence
  Amplification primer (reverse)
ggggaccactttgtacaagaaagctgggtttagtttatctaaagcgttc

SEQ ID NO: 11956 - DNA, 50 bp, Artificial Sequence
  Amplification primer (reverse)
ggggaccactttgtacaagaaagctgggtttttatgtatagaaacagcag

SEQ ID NO: 11957 - DNA, 52 bp, Artificial Sequence
  Amplification primer (reverse)
ggggaccactttgtacaagaaagctgggttaatgtacataacaatagagagc

SEQ ID NO: 11958 - DNA, 46 bp, Artificial Sequence
  Amplification primer (reverse)
ggggaccactttgtacaagaaagctgggttcaacgatcccaagaac

SEQ ID NO: 11959 - DNA, 46 bp, Artificial Sequence
  Amplification primer (reverse)
ggggaccactttgtacaagaaagctgggttgccattcttacctcct

SEQ ID NO: 11960 - DNA, 46 bp, Artificial Sequence
  Amplification primer (reverse)
ggggaccactttgtacaagaaagctgggttacgttttttctgaccg

SEQ ID NO: 11961 - DNA, 52 bp, Artificial Sequence
  Amplification primer (reverse)
ggggaccactttgtacaagaaagctgggtttataaaataaatttgaagatct

SEQ ID NO: 11962 - DNA, 48 bp, Artificial Sequence
  Amplification primer (reverse)
ggggaccactttgtacaagaaagctgggttatcatcttgtaccaactc

SEQ ID NO: 11963 - DNA, 46 bp, Artificial Sequence
  Amplification primer (reverse)
ggggaccactttgtacaagaaagctgggttgccaataaattcacgg

SEQ ID NO: 11964 - DNA, 50 bp, Artificial Sequence
  Amplification primer (reverse)
ggggaccactttgtacaagaaagctgggttagtctgttttttaacaaaag

SEQ ID NO: 11965 - DNA, 49 bp, Artificial Sequence
  Amplification primer (reverse)
ggggaccactttgtacaagaaagctgggtttggttttagaacaacttta

SEQ ID NO: 11966 - DNA, 48 bp, Artificial Sequence
  Amplification primer (reverse)
ggggaccactttgtacaagaaagctgggttaattaagctgaaaatgac

SEQ ID NO: 11967 - DNA, 52 bp, Artificial Sequence
  Amplification primer (reverse)
ggggaccactttgtacaagaaagctgggttattatattcttttaatttgtca

SEQ ID NO: 11968 - DNA, 46 bp, Artificial Sequence
  Amplification primer (reverse)
ggggaccactttgtacaagaaagctgggttcttacgacgtcctgga

SEQ ID NO: 11969 - DNA, 50 bp, Artificial Sequence
  Amplification primer (reverse)
ggggaccactttgtacaagaaagctgggttgtgtgtcatgactactgtac

SEQ ID NO: 11970 - DNA, 46 bp, Artificial Sequence
  Amplification primer (reverse)
ggggaccactttgtacaagaaagctgggtttgagtagagcacaagc

SEQ ID NO: 11971 - DNA, 47 bp, Artificial Sequence
  Amplification primer (reverse)
ggggaccactttgtacaagaaagctgggttgaaacgaatacgttctt

SEQ ID NO: 11972 - DNA, 48 bp, Artificial Sequence
  Amplification primer (reverse)
ggggaccactttgtacaagaaagctgggttactacctaccgttttcac

SEQ ID NO: 11973 - DNA, 47 bp, Artificial Sequence
  Amplification primer (reverse)
ggggaccactttgtacaagaaagctgggtttttgatggtaacagtcg

SEQ ID NO: 11974 - DNA, 46 bp, Artificial Sequence
  Amplification primer (reverse)
ggggaccactttgtacaagaaagctgggttagaaaggcgctcttct

SEQ ID NO: 11975 - DNA, 49 bp, Artificial Sequence
  Amplification primer (reverse)
ggggaccactttgtacaagaaagctgggtttatctttaataaagcccta

SEQ ID NO: 11976 - DNA, 47 bp, Artificial Sequence
  Amplification primer (reverse)
ggggaccactttgtacaagaaagctgggttcatcccataaatttgtt

SEQ ID NO: 11977 - DNA, 48 bp, Artificial Sequence
  Amplification primer (reverse)
ggggaccactttgtacaagaaagctgggttcaagacatttcttaaagc

SEQ ID NO: 11978 - DNA, 46 bp, Artificial Sequence
  Amplification primer (reverse)
ggggaccactttgtacaagaaagctgggttttttgttttagcgatg

SEQ ID NO: 11979 - DNA, 46 bp, Artificial Sequence
  Amplification primer (reverse)
ggggaccactttgtacaagaaagctgggttttttaaaccatgctgt

SEQ ID NO: 11980 - DNA, 48 bp, Artificial Sequence
  Amplification primer (reverse)
ggggaccactttgtacaagaaagctgggtttttgtaaagaccttcttt

SEQ ID NO: 11981 - DNA, 48 bp, Artificial Sequence
  Amplification primer (reverse)
ggggaccactttgtacaagaaagctgggttttcctcgtttattaattt

SEQ ID NO: 11982 - DNA, 46 bp, Artificial Sequence
  Amplification primer (reverse)
ggggaccactttgtacaagaaagctgggttaaagaaaagatgtgcc

SEQ ID NO: 11983 - DNA, 46 bp, Artificial Sequence
  Amplification primer (reverse)
ggggaccactttgtacaagaaagctgggttctgtgcaggctcaaat

SEQ ID NO: 11984 - DNA, 49 bp, Amplification primer (reverse)
ggggaccactttgtacaagaaagctgggttaattgtccagtctaagtta

SEQ ID NO: 11985 - DNA, 50 bp, Artificial Sequence
  Amplification primer (reverse)
ggggaccactttgtacaagaaagctgggttatttagtgttatttctcctg

SEQ ID NO: 11986 - DNA, 49 bp, Artificial Sequence
  Amplification primer (reverse)
ggggaccactttgtacaagaaagctgggttttttttaagtgatgatgaa

SEQ ID NO: 11987 - DNA, 47 bp, Artificial Sequence; identical to SEQ ID NO: 11801
  Amplification primer (reverse)

SEQ ID NO: 11988 - DNA, 47 bp, Artificial Sequence
  Amplification primer (reverse)
ggggaccactttgtacaagaaagctgggttttttggggttactttac

SEQ ID NO: 11989 - DNA, 48 bp, Artificial Sequence
  Amplification primer (reverse)
ggggaccactttgtacaagaaagctgggttttttgctgaaataatgtt

SEQ ID NO: 11990 - DNA, 46 bp, Artificial Sequence
  Amplification primer (reverse)
ggggaccactttgtacaagaaagctgggttatcatacgaatgcaac

SEQ ID NO: 11991 - DNA, 49 bp, Artificial Sequence
  Amplification primer (reverse)
ggggaccactttgtacaagaaagctgggtttttttcatattttttcaaa

SEQ ID NO: 11992 - DNA, 50 bp, Artificial Sequence
  Amplification primer (reverse)
ggggaccactttgtacaagaaagctgggttattatttttataagcatgtg

SEQ ID NO: 11993 - DNA, 48 bp, Artificial Sequence; identical to SEQ ID NO: 11799
  Amplification primer (reverse)

SEQ ID NO: 11994 - DNA, 48 bp, Artificial Sequence
  Amplification primer (reverse)
ggggaccactttgtacaagaaagctgggttgataagcactttccttaa

SEQ ID NO: 11995 - DNA, 46 bp, Artificial Sequence
  Amplification primer (reverse)
ggggaccactttgtacaagaaagctgggttgcctaaaaaccaatca

SEQ ID NO: 11996 - DNA, 46 bp, Artificial Sequence; identical to SEQ ID NO: 11640
  Amplification primer (reverse)

SEQ ID NO: 11997 - DNA, 48 bp, Artificial Sequence; identical to SEQ ID NO: 11802
  Amplification primer (reverse)

SEQ ID NO: 11998 - DNA, 50 bp, Artificial Sequence; identical to SEQ ID NO: 11650
  Amplification primer (reverse)

SEQ ID NO: 11999 - DNA, 47 bp, Artificial Sequence
  Amplification primer (reverse)
ggggaccactttgtacaagaaagctgggttggctttaaagttcgata

SEQ ID NO: 12000 - DNA, 49 bp, Artificial Sequence; identical to SEQ ID NO: 11548
  Amplification primer (reverse)

SEQ ID NO: 12001 - DNA, 47 bp, Artificial Sequence
  Amplification primer (reverse)
ggggaccactttgtacaagaaagctgggttatgtttatggcttgctt

SEQ ID NO: 12002 - DNA, 48 bp, Artificial Sequence; identical to SEQ ID NO: 11802
  Amplification primer (reverse)

SEQ ID NO: 12003 - DNA, 49 bp, Artificial Sequence
  Amplification primer (reverse)
ggggaccactttgtacaagaaagctgggttgagttgtctttttttgtct

SEQ ID NO: 12004 - DNA, 46 bp, Artificial Sequence
  Amplification primer (reverse)
ggggaccactttgtacaagaaagctgggttttcaacttgattgcca

SEQ ID NO: 12005 - DNA, 45 bp, Artificial Sequence
  Amplification primer (reverse)
ggggaccactttgtacaagaaagctgggttttttgcaatttttgc

SEQ ID NO: 12006 - DNA, 47 bp, Artificial Sequence
  Amplification primer (reverse)
ggggaccactttgtacaagaaagctgggttttttaatgctgtttgaa

SEQ ID NO: 12007 - DNA, 47 bp, Artificial Sequence
  Amplification primer (reverse)
ggggaccactttgtacaagaaagctgggttttttttagctaaggctg

SEQ ID NO: 12008 - DNA, 47 bp, Artificial Sequence
  Amplification primer (reverse)
ggggaccactttgtacaagaaagctgggttttttgctaaaccttctg

SEQ ID NO: 12009 - DNA, 49 bp, Artificial Sequence
  Amplification primer (reverse)
ggggaccactttgtacaagaaagctgggttattcatattaacacgatgc

SEQ ID NO: 12010 - DNA, 46 bp, Artificial Sequence
  Amplification primer (reverse)
ggggaccactttgtacaagaaagctgggtttttgcgttttggaggg

SEQ ID NO: 12011 - DNA, 46 bp, Artificial Sequence
  Amplification primer (reverse)
ggggaccactttgtacaagaaagctgggtttgcaccttgatggcga

SEQ ID NO: 12012 - DNA, 48 bp, Artificial Sequence
  Amplification primer (reverse)
ggggaccactttgtacaagaaagctgggttccataatatttgatgctg

SEQ ID NO: 12013 - DNA, 48 bp, Artificial Sequence
  Amplification primer (reverse)
ggggaccactttgtacaagaaagctgggttttctaatcctacagcatg

SEQ ID NO: 12014 - DNA, 50 bp, Artificial Sequence
  Amplification primer (reverse)
ggggaccactttgtacaagaaagctgggttaaaaattcctcctaaattaa

SEQ ID NO: 12015 - DNA, 53 bp, Artificial Sequence
  Amplification primer (reverse)
ggggaccactttgtacaagaaagctgggttaaagttttgactattactgatag

SEQ ID NO: 12016 - DNA, 47 bp, Artificial Sequence
  Amplification primer (reverse)
ggggaccactttgtacaagaaagctgggtttgggggagatagttatg

SEQ ID NO: 12017 - DNA, 48 bp, Artificial Sequence
  Amplification primer (reverse)
ggggaccactttgtacaagaaagctgggttttgacagaaagctaattg

SEQ ID NO: 12018 - DNA, 7361 bp, Streptococcus agalactiae
ctttgatacaatattatcaaaattatattaacggtaaagatattgttaaagaccaaacttggattatcaatcgttatcaagaaattattagtgatttgtctttaggaagcactattgcagaagaaattactcgctctatagagcagctagcttcacttcccatagaaaataatcagtttttatatgattgttttttagcagccggtgaagataacaacgcaaagttagttgcaacgttttttaatcaaaatgacattcctgcaagatatgttcatccaaacgaagcaggaattattgtaactaaagaaccatgtaatgcacgaattattccaggaagttatgataagattgagaacttatgtctatacaatgaggttcttgttatccctggattttttggagtcacagaagataaccaaatttgtaccttttcaagagggggatctgacattactggatccctaattgcagcaggcataaaagcagacctttatgagaacttcacagatgttgatggtatatttgcagcacatccaggtgtagttaagaaccctcacgctatccctgagcttacttataaagaaatgcgtgaattagcctatgcgggtttttcggttttacatgatgaagctttacttcctgcctatcgtggcagaatccctcttgttattaaaaatacaaataatccccaacagcctggtacaaaaatagttttaaagcatactcgtagtaacatagcagtaactgggatcgcttctgatagccgttttgctagcataaacgtatctaaatacttaatgaatagagaagtaggtttcggccgaaaagtactacaaattttagaggatttaaatattagttttgaacatatgccaactggcatagatgatctatccattgtcttacgtgaaaaagaattgacaccaatcaaagaacaagaaatcttaaattacctaactcgtaaactagaagtagattacgttgacatccaacacaatctatctacaatcgtaattgtaggtgaaaatatgaaaagtcagattggagtcactgcaacagcgacacaagccttatcaagagaaaaaatcaatatcaccatgatatcacaaggttcaagcgaagtctccattatgttcgttataaacagtaaggatgaaaaaagagctattaaagcactatatgaaacattcttccaaaaatagtacctattacactacttacactattagatagataacaaatcgtcctaagtaagcttacttaggacgattttatttagaacataggatagtttttccacttttaatcgtaaccacttggtatcagtgacaaattcggacaattaagatgttagccaatcttaaggataataattccaataaaaaaaggctaaccaaagttagtctccctttatctactccgccagtaggactcgaacctacgacatcatgattaacagtcatgcgctactaccaactgagctatggcggattatagctaagcgactaccttatctcacagggggcaacccccaactacttccggcgttctagggcttaacttctgtgttcggcatgagaacaggtgtatctcctaggcaattatcacttaactattgagccttattcactcaaaattgaatatctatagtctaacaagaaaccgtaacgttgtcaatatctctttttggataagtcctcgagctattagtattagtccgctaaatgtgtcaccacaattacactcctaacctatctacctgatcatctctcagggctcttactgatataaaatcatgggaaatctcatcttgaggtgggcttcgcacttagatgctttcagcgcttatcccttccctacatagctacccagcgatgcctttggcaagacaactggtacaccagcggtaagtccactctggtcctctcgtactaggagcagatcctctcaaatttcctacgcccgcgacggatagggaccgaactgtctcacgacgttctgaacccagctcgcgtgccgctttaatgggcgaacagcccaacccttgggaccgactacagccccaggatgcgacgagccgacatcgaggtgccaaacctccccgtcgatgtgaactcttgggggagataagcctgttatccccagggtagcttttatccgttgagcgatggcccttccatacggaaccaccggatcactaagcccgactttcgtccctgctcgagttgtagctctcgcagtcaagctcccttatacctttacactctacgactgatttccaaccagtctgagggaacctttgggcgcctccgttaccttttaggaggcgaccgccccagtcaaactgcccgtcagacactgtctccgatagggattgcctatctgggttagagtagccataacacaagggtagtatcccaacaacgcctcaaacgaaactggcgtcccgttatcataggctcctacctatcctgtacatgtggtacagatactcaatatcaaactgcagtaaagctccatggggtctttccgtcctgtcgcgggtaacctgcatcttcacaggtactaaaatttcaccgagtctctcgttgagacagtgcccaaatcattacgcctttcgtgcgggtcggaacttacccgacaaggaatttcgctaccttaggaccgttatagttacggccgccgtttactggggcttcaattcataccttcgcttacgctaagcactcctcttaaccttccagcaccgggcaggcgtcaccccctatacatcatcttacgatttagcagagagctgtgtttttgataaacagttgcttgggcctattcactgcggctgatctaaaatcagcgccccttctcccgaagttacggggccattttgccgagttccttaacgagagttctctcgctcacctgaggctactcgcctcgactacctgtgtcggtttgcggtacgggtagagtatatgtatcgctagaagcttttcttggcagtgtgacatcactaacttcgctactaaacttcgctcctcgtcacagctcaatgttaaagatataagcatttgactcatatcacacctcactgtttgaccagacacttccaatcgtctggtttagttagcctactgcgtccctccatcactatatactctagtacaggaatatcaacctgttgtccatcggatacacctttcggtctctccttaggtcccgactaacccagggcggacgagccttcccctggaaaccttagtcttacggtggacaggattctcacctgtcttgcgctactcataccggcattctcacttctatgcgttccagcgctcctcacggtacaccttcttcacacatagaacgctctcctaccatgacacttttgtgtcatccacagcttcggtaatatgttttagccccggtacattttcggcgcagggtcactcgactagtgagctattacgcactctttgaatgaatagctgcttctaagctaacatcctagttgtctgtgcaaccccacatccttttccacttaacatatattttgggaccttagctggtggtctgggctgtttccctttcgactacggatcttagcactcgcagtctgactgccgattatatctcgttggcattcggagtttatctgagattggtaatccgggatggacccctcacccaaacagtgctctacctccaagagacttaacatcgacgctagccctaaagctatttcggagagaaccagctatctccaagttcgtttggaatttctccgctacccacaagtcatccaagcacttttcaacgtgccctggttcggtcctccagtgagttttacctcaccttcaacctgctcatgggtaggtcacatggtttcgggtctacaacatgatactatgacgccctattaagactcggtttccctacggctccgtctcttcaacttaacctcgcatcatatcgtaactcgccggttcattctacaaaaggcacgctctcacccattaacgggctcgaacttgttgtaggcacacggtttcaggttctatttcactcccctcccggggtgcttttcacctttccctcacggtactggttcactatcggtcactagagagtatttagggttgggagatggtcctcccagattccgacgagatttcgcgtgtctcgccgtactcaggatactgctaaggttaatctatcattttaaatacgaggctgttactctctttggcttaccttcccaggtaattcttctataatgattaatcctatatcgcagtcctacaaccccgaagtgtaaacacttcggtttgccctcctgccgtttcgctcgccgctactaaggcaatcgcttttgctttctcttcctgcagctacttagatgtttcagttcactgcgtcttccttctcatatccttaacagatatggatactagtcattaactagtgggttcccccattcggacatctctggatcagcgcttacttacagctccccaaagcatttcgtcgttagtcacgtccttcttcggcttctagtgccaaggcatccaccgtgcgcccttattaacttaaccttattaacctagtttctttaaaactagaaaactcattaaatattcacagcgttttcggtttattttcttgttactttctacaatctatttctagatcgtggaatttgatatagatattcaattttcaatgaacaatttgaacctttcgattcaatggagcctagcgggatcgaaccgctgacctcctgcgtgcaaagcaggcgctctcccagctgagctaaggccccacaagacctctcaaaactaaacaagacgcaaatggcaggtttccttatccttagaaaggaggtgatccagccgcaccttccgatacggctaccttgttacgacttcaccccaatcatctatcccaccttaggcggctggctcctaaaaggttacctcaccgacttcgggtgttacaaactctcgtggtgtgacgggcggtgtgtacaaggcccgggaacgtattcaccgcggcgtgctgatccgcgattactagcgattccgacttcatgtaggcgagttgcagcctacaatccgaactgagattggctttaagagattagcttgccgtcaccggcttgcgactcgttgtaccaaccattgtagcacgtgtgtagcccaggtcataaggggcatgatgatttgacgtcatccccaccttcctccggtttattaccggcagtctcgctagagtgcccaacttaatgatggcaactaacaataggggttgcgctcgttgcgggacttaacccaacatctcacgacacgagctgacgacaaccatgcaccacctgtcacttctgctccgaagagaaagcctatctctaggccggtcagaaggatgtcaagacctggtaaggttcttcgcgttgcttcgaattaaaccacatgctccaccgcttgtgcgggcccccgtcaattcctttgagtttcaaccttgcggtcgtactccccaggcggagtgcttaatgcgttagctgcggcactaagccccggaaagggcctaacacctagcactcatcgtttacggcgtggactaccagggtatctaatcctgtttgctccccacgctttcgagcctcagcgtcagttacagaccagagagccgctttcgccaccggtgttcctccatatatctacgcatttcaccgctacacatggaattccactctccccttctgcactcaagtcctccagtttccaaagcgtacaatggttaagccactgcctttaacttcagacttaaagaaccgcctgcgctcgctttacgcccaataaatccggacaacgctcgggacctacgtattaccgcggctgctggcacgtagttagccgtccctttctggttagttaccgtcacttggtagattttccactcctaccaacgttcttctctaacaacagagctttacgatccgaaaaccttcttcactcacgcggcgttgctcggtcagacttccgtccattgccgaagattccctactgctgcctcccgtaggagtctgggccgtgtctcagtcccagtgtggccgatcaccctctcaggtcggctatgtatcgtcgccttggtgagcctttacctcaccaactagctaatacaacgcaggtccatctcacagtgaagcaattgctccttttaaataactaacatgtgttaattactcttatgcggtattagctatcgtttccaatagttatcccccgctatgaggcaggttacctacgcgttactcacccgttcgcaactcatcagtctagtgtaaacaccaaacctcagcgttctacttgcatgtattaggcacgccgccagcgttcgtcctgagccaggatcaaactctcattaaaagtttgagctttgctcttttctgtctcgctgacagatttattgttttttgtcattgacggatttacaatgtaaatccaccctgcacattcgttcatcttgttcagttttcaaaggtctttgcctctcttgagacaacttctatattctagcaaacttattctgctttgtcaactactttttttaagttgtttataaaatgataatacaatattaggttcgcttaagaactcatttagtatactataattttttatttgttgtcaataggttttaaaaaaatctcagagaaaaccctgagattttttaaattatgttacaaagttaatttcctttagcttcaattaaacctagttcgccatcttcacgcttgtaaaggacatttgtcgtattatcttctgcatctgtatagataaagaaatcatgacctaaaagttccatttgcaacaatgcttcctcaacatccattggttttagattaacattcttagtacgtacaattctttggcttactgcttcttcatctggctcagcctcaaattctgttgtgaaaacttgacttgctggaatcttttcacgatattttttcgcaattttagttttatttttacgaatttgacgctcaattttatcaacaactaagtcaattgacccatacatatcttgtgaaacatcttctgctcgtaaagtaatagaatctattaagattgttacttcaacttttgcggtcttctctctgtatactttgaggttgactctagtatctaattcttgtgcttcattaaagtatttttcaactttagagagtttggtctcaacatactcacgaatagcttctgttacttcgatgttttcaccacgaatactgtatttaatcatatgagtacctctttcttgcgttgttaacgctttctatactcttattataaccgctttcatgaaaa

SEQ ID NO: 12019 - DNA, 8172 bp, Streptococcus agalactiae
tccaatcatacttaatttcactaatatctggattttgacatattcagttaattctttttcatgctttttgagataagctacttgttctttttttattacttttttacctttctttactgctgactgtttgctattttttacttcgtttgactgacttttagattcactattcatttgacagcctgctagtaacatcccaataatagatatgggaattaaccattttacatattttttcaacatgctctcttttcttagaaaataaacttcccatgtcaagtatctaataaaaataattattatttaccagtatgttaaaactaatattagtataacaaattttcacgagtttaattttttagtcgtaacatatacactgaaaaatcttattattttatactacctatctatcattcacaaacacttttattacttcagaacctatgacatttaggagtcctctttgaatttcatttaaatgttgagtctccactaactcttgaaaaatttccttattatttctgcttgttttaaaccttctataacgattgcaataatgaaaaacaaatataagtaattttcagtaactttttctcaaaattaccagcacaatacaaaaaagacaaggcttctaaaccttgtctttataaatataccggcggccggggtcgaaccggcacgtccgtgaggacactggattttgagtccagcgcgtctgccaattccgccacgccggctatcttaaaactggggtagctggattcgaaccaacgcatgagggagtcaaagtcccttgccttaccgcttggctataccccatgaaaaggcgagtgatgggaatcgaacccacgaatgtcagagccacaatctgatgtgttaaccacttcaccacacccgccatattagaaaaaacacgggcagtaggaatcgaacccacactgaaggttttggagaccttagttctacctttaaactatgcccgtttactatggagagagagggattcgaacccccgaacccgaaggagcggatttacagtccgccgcgtttagcctcttcgctatctctcctaaggtataaatggcgcgagacggaatcgaaccgccgacacatggagcttcaatccattgctctaccaactgagctaccgagcctattgcgggagcaggatttgaacctacgaccttcgggttatgagcccgacgagctacctagctgctccatcccgcgatatctttaaaggaggatgtgggattcgaacccacgcacgcttttacacgcctgacggttttcaagaccgttcccttcagccggacttgggtaatcctccatataacaaaaaatagtccgtacgggattcgaacccgtgttaccgccgtgaaaaggcggtgtcttaaccccttgaccaacggaccatattcttgatgggcacgagtggactcgaaccaccgacctcacgcttatcaggcgtgcgctctaaccacctgagctacgcgcccaaaataacttctaaaattataaagttaatgccggctacatgacttgaacacgcgaccctctgattacaaatcagatgctctaccaactgagctaagccggcaatctactaatgcgggtgaagggacttgaacccccacgccgttaagcgccagatcctaaatctggtgcgtctgccaattccgccacacccgcatttctaaatgacccgtactgggctcgaaccagtgacccattgattaaaagtcaattgctctaccaactgagctaacgagtctacggtcccgacgggaatcgaacccgcgatcttcgccgtgacagggcgacgtgataaccgctacactacgggacctatgggagttaacgggatcgaaccgctgaccctctgcttgtaaggcagatgctctcccagctgagctaaactccctttgctaagcgactaccttatctcacagggggcaacccccaactacttccggcgttctagggcttaacttctgtgttcggcatgagaacaggtgtatctcctaggcaattatcacttaactattgagccttattcactcaaaattgaatatctatagtctaacaagaaaccgtaacgttgtcaatatctctttttggataagtcctcgagctattagtattagtccgctaaatgtgtcaccacaattacactcctaacctatctacctgatcatctctcagggctcttactgatataaaatcatgggaaatctcatcttgaggtgggcttcgcacttagatgctttcagcgcttatcccttccctacatagctacccagcgatgcctttggcaagacaactggtacaccagcggtaagtccactctggtcctctcgtactaggagcagatcctctcaaatttcctacgcccgcgacggatagggaccgaactgtctcacgacgttctgaacccagctcgcgtgccgctttaatgggcgaacagcccaacccttgggaccgactacagccccaggatgcgacgagccgacatcgaggtgccaaacctccccgtcgatgtgaactcttgggggagataagcctgttatccccagggtagcttttatccgttgagcgatggcccttccatacggaaccaccggatcactaagcccgactttcgtccctgctcgagttgtagctctcgcagtcaagctcccttatacctttacactctacgactgatttccaaccagtctgagggaacctttgggcgcctccgttaccttttaggaggcgaccgccccagtcaaactgcccgtcagacactgtctccgatagggattgcctatctgggttagagtagccataacacaagggtagtatcccaacaacgcctcaaacgaaactggcgtcccgttatcataggctcctacctatcctgtacatgtggtacagatactcaatatcaaactgcagtaaagctccatggggtctttccgtcctgtcgcgggtaacctgcatcttcacaggtactaaaatttcaccgagtctctcgttgagacagtgcccaaatcattacgcctttcgtgcgggtcggaacttacccgacaaggaatttcgctaccttaggaccgttatagttacggccgccgtttactggggcttcaattcataccttcgcttacgctaagcactcctcttaaccttccagcaccgggcaggcgtcaccccctatacatcatcttacgatttagcagagagctgtgtttttgataaacagttgcttgggcctattcactgcggctgatctaaaatcagcgccccttctcccgaagttacggggccattttgccgagttccttaacgagagttctctcgctcacctgaggctactcgcctcgactacctgtgtcggtttgcggtacgggtagagtatatgtatcgctagaagcttttcttggcagtgtgacatcactaacttcgctactaaacttcgctcctcgtcacagctcaatgttaaagatataagcatttgactcatatcacacctcactgtttgaccagacacttccaatcgtctggtttagttagcctactgcgtccctccatcactatatactctagtacaggaatatcaacctgttgtccatcggatacacctttcggtctctccttaggtcccgactaacccagggcggacgagccttcccctggaaaccttagtcttacggtggacaggattctcacctgtcttgcgctactcataccggcattctcacttctatgcgttccagcgctcctcacggtacaccttcttcacacatagaacgctctcctaccatgacacttttgtgtcatccacagcttcggtaatatgttttagccccggtacattttcggcgcagggtcactcgactagtgagctattacgcactctttgaatgaatagctgcttctaagctaacatcctagttgtctgtgcaaccccacatccttttccacttaacatatattttgggaccttagctggtggtctgggctgtttccctttcgactacggatcttagcactcgcagtctgactgccgattatatctcgttggcattcggagtttatctgagattggtaatccgggatggacccctcacccaaacagtgctctacctccaagagacttaacatcgacgctagccctaaagctatttcggagagaaccagctatctccaagttcgtttggaatttctccgctacccacaagtcatccaagcacttttcaacgtgccctggttcggtcctccagtgagttttacctcaccttcaacctgctcatgggtaggtcacatggtttcgggtctacaacatgatactatgacgccctattaagactcggtttccctacggctccgtctcttcaacttaacctcgcatcatatcgtaactcgccggttcattctacaaaaggcacgctctcacccattaacgggctcgaacttgttgtaggcacacggtttcaggttctatttcactcccctcccggggtgcttttcacctttccctcacggtactggttcactatcggtcactagagagtatttagggttgggagatggtcctcccagattccgacgagatttcgcgtgtctcgccgtactcaggatactgctaaggttaatctatcattttaaatacgaggctgttactctctttggcttaccttcccaggtaattcttctataatgattaatcctatatcgcagtcctacaaccccgaagtgtaaacacttcggtttgccctcctgccgtttcgctcgccgctactaaggcaatcgcttttgctttctcttcctgcagctacttagatgtttcagttcactgcgtcttccttctcatatccttaacagatatggatactagtcattaactagtgggttcccccattcggacatctctggatcagcgcttacttacagctccccaaagcatttcgtcgttagtcacgtccttcttcggcttctagtgccaaggcatccaccgtgcgcccttattaacttaaccttattaacctagtttctttaaaactagaaaactcattaaatattcacagcgttttcggtttattttcttgttactttctacaatctatttctagatcgtggaatttgatatagatattcaattttcaatgaacaatttgaacctttcgattcaatggagcctagcgggatcgaaccgctgacctcctgcgtgcaaagcaggcgctctcccagctgagctaaggccccacaagacctctcaaaactaaacaagacgcaaatggcaggtttccttatccttagaaaggaggtgatccagccgcaccttccgatacggctaccttgttacgacttcaccccaatcatctatcccaccttaggcggctggctcctaaaaggttacctcaccgacttcgggtgttacaaactctcgtggtgtgacgggcggtgtgtacaaggcccgggaacgtattcaccgcggcgtgctgatccgcgattactagcgattccgacttcatgtaggcgagttgcagcctacaatccgaactgagattggctttaagagattagcttgccgtcaccggcttgcgactcgttgtaccaaccattgtagcacgtgtgtagcccaggtcataaggggcatgatgatttgacgtcatccccaccttcctccggtttattaccggcagtctcgctagagtgcccaacttaatgatggcaactaacaataggggttgcgctcgttgcgggacttaacccaacatctcacgacacgagctgacgacaaccatgcaccacctgtcacttctgctccgaagagaaagcctatctctaggccggtcagaaggatgtcaagacctggtaaggttcttcgcgttgcttcgaattaaaccacatgctccaccgcttgtgcgggcccccgtcaattcctttgagtttcaaccttgcggtcgtactccccaggcggagtgcttaatgcgttagctgcggcactaagccccggaaagggcctaacacctagcactcatcgtttacggcgtggactaccagggtatctaatcctgtttgctccccacgctttcgagcctcagcgtcagttacagaccagagagccgctttcgccaccggtgttcctccatatatctacgcatttcaccgctacacatggaattccactctccccttctgcactcaagtcctccagtttccaaagcgtacaatggttaagccactgcctttaacttcagacttaaagaaccgcctgcgctcgctttacgcccaataaatccggacaacgctcgggacctacgtattaccgcggctgctggcacgtagttagccgtccctttctggttagttaccgtcacttggtagattttccactcctaccaacgttcttctctaacaacagagctttacgatccgaaaaccttcttcactcacgcggcgttgctcggtcagacttccgtccattgccgaagattccctactgctgcctcccgtaggagtctgggccgtgtctcagtcccagtgtggccgatcaccctctcaggtcggctatgtatcgtcgccttggtgagcctttacctcaccaactagctaatacaacgcaggtccatctcacagtgaagcaattgctccttttaaataactaacatgtgttaattactcttatgcggtattagctatcgtttccaatagttatcccccgctatgaggcaggttacctacgcgttactcacccgttcgcaactcatcagtctagtgtaaacaccaaacctcagcgttctacttgcatgtattaggcacgccgccagcgttcgtcctgagccaggatcaaactctcattaaaagtttgagctttgctcttttctgtctcgctgacagatttattgttttttgtcattgacggatttacaatgtaaatccaccctgcacattcgttcgtcttgttcagttttcaaaggtctttgcctctcttgagacaacttctatattctagcaaacttattctgctttgtcaactactttttttaagttgttaactacgcgctaatagaaactgctctctcgagacaacttattcattatactaaatatttctacttcctgtcaatactatttttgtattttataaatttagtatagacataactattcctctatattcaattaagagaaattatataaccactattgagaaatgtagtctagcgattaaattctttgctcatcgaaaatatccaataaatataataatgcataaaacgcctgcttacgaaatataaacaaaattgtttgcatttcgtaaacaagcgttacctatttaacaatatatgatgagtgttcccgctgagaataattctcagcggtagaccagagctagactaagaatcgattgattccatcatcataacactcaacaaaattgataaaaattatactaattcaataattgccattggggcagcatcgccacggcgtggttctgttttaagaatacgagtgtatcctccgttacgttcagcataacgaggtgcgatgtcgtcaaaaagtttttgaagagctgttgttgatgtatatttatcagaagcttcatcatagttttctgatgcaatttcattacgtacataagcagcagcttgacgacgagcatgtaaatcaccacgtttacctagagtaatcattttttcaactgttttacggatttctttagcacgtgcttcagtagttacaattgattcgttgataagaagatcggttgtcaaatcacgaagcattgccttacgttgtgagctagtgcgtcctagtttacggtaagccattatgtcctcctattttatttatcgttttttaatccaagacctagatcggcaagtttgattttaacttcttcaagactcttacgtcctaagtttcggactttcatcatttcaggctcagttttttctgttaaatcaaatactgtattaattccagcacgttttaaacagttatatgagcgcactgacaaatcaagttcctcaattgtccggtcaagcactttctcatcgttcactttctctgtttccttcattacttcagttgctttagcaacctctgttaaatcagtaaacaagtttaagtgttcaattaagacgcgagctgaaagaccaagagcatcctcaggaatga

SEQ ID NO: 12020 - DNA, 7267 bp, Streptococcus agalactiae
atcaaaaaaacatgaccagtatgaattaaagcaacgtataatcaatgccttaatgcgtaaaggataccagtacgaagatatcaaaagtgctttaagagaatatttataagataataactctcagacgatgtattttacagaaaattatgataaactataacagacgtataaattgtagaaagttggtaggctatgagattacctaaagaaggcgactttattacaattcaaagttacaaacatgatggtagtttacaccgaacttggcgtgacaccatggtattaaaaacaaccgaaaatgccctcattggtgttaatgatcatactttagtaacagaaaatgatggtcgacgctgggtgacacgagagcctgcaatagtatactttcataaaaaatactggtttaacattatcgctatgatacgtgaaactggtgtctcctactattgtaatctagcaagtccgtatatcttggaccctgaagcactcaagtatattgactatgaccttgatgtcaaagtatttgcagatggtgaaaaaagactactagatgtggacgaatatgaacagcataaagytcagatgaactatcctaccgatattgattatatattaaaggaaaatgtaaaaatattggtagaatggataaatgagaataaaggccccttttcatcatcatatatcaatatctggtataaacggtaccttgaattgaaaaagcgctaactaacacactaaatagtgtgtttttattaatatcaaatttaattacaatactattgcaaaaatatatacttaaaataaaaaaagtagaaagatcactttctacttttttaagaatagtccgtacgggattcgaacccgtgttaccgccgtgaaaaggcggtgtcttaaccccttgaccaacggaccatattcttgatgggcacgagtggactcgaaccaccgacctcacgcttatcaggcgtgcgctctaaccacctgagctacgcgcccaagctattgcttggtttttactttcttataaagtaaagcgggtgacgagaatcgaactcgcgacaacagcttggaaggctgtagttttaccactaaactacacccgcttctatgggagttaacgggatcgaaccgctgaccctctgcttgtaaggcagatgctctcccagctgagctaaactccctttgctaagcgactaccttatctcacagggggcaacccccaactacttccggcgttctagggcttaacttctgtgttcggcatgagaacaggtgtatctcctaggcaattatcacttaactattgagccttattcactcaaaattgaatatctatagtctaacaagaaaccgtaacgttgtcaatatctctttttggataagtcctcgagctattagtattagtccgctaaatgtgtcaccacaattacactcctaacctatctacctgatcatctctcagggctcttactgatataaaatcatgggaaatctcatcttgaggtgggcttcgcacttagatgctttcagcgcttatcccttccctacatagctacccagcgatgcctttggcaagacaactggtacaccagcggtaagtccactctggtcctctcgtactaggagcagatcctctcaaatttcctacgcccgcgacggatagggaccgaactgtctcacgacgttctgaacccagctcgcgtgccgctttaatgggcgaacagcccaacccttgggaccgactacagccccaggatgcgacgagccgacatcgaggtgccaaacctccccgtcgatgtgaactcttgggggagataagcctgttatccccagggtagcttttatccgttgagcgatggcccttccatacggaaccaccggatcactaagcccgactttcgtccctgctcgagttgtagctctcgcagtcaagctcccttatacctttacactctacgactgatttccaaccagtctgagggaacctttgggcgcctccgttaccttttaggaggcgaccgccccagtcaaactgcccgtcagacactgtctccgatagggattgcctatctgggttagagtagccataacacaagggtagtatcccaacaacgcctcaaacgaaactggcgtcccgttatcataggctcctacctatcctgtacatgtggtacagatactcaatatcaaactgcagtaaagctccatggggtctttccgtcctgtcgcgggtaacctgcatcttcacaggtactaaaatttcaccgagtctctcgttgagacagtgcccaaatcattacgcctttcgtgcgggtcggaacttacccgacaaggaatttcgctaccttaggaccgttatagttacggccgccgtttactggggcttcaattcataccttcgcttacgctaagcactcctcttaaccttccagcaccgggcaggcgtcaccccctatacatcatcttacgatttagcagagagctgtgtttttgataaacagttgcttgggcctattcactgcggctgatctaaaatcagcgccccttctcccgaagttacggggccattttgccgagttccttaacgagagttctctcgctcacctgaggctactcgcctcgactacctgtgtcggtttgcggtacgggtagagtatatgtatcgctagaagcttttcttggcagtgtgacatcactaacttcgctactaaacttcgctcctcgtcacagctcaatgttaaagatataagcatttgactcatatcacacctcactgtttgaccagacacttccaatcgtctggtttagttagcctactgcgtccctccatcactatatactctagtacaggaatatcaacctgttgtccatcggatacacctttcggtctctccttaggtcccgactaacccagggcggacgagccttcccctggaaaccttagtcttacggtggacaggattctcacctgtcttgcgctactcataccggcattctcacttctatgcgttccagcgctcctcacggtacaccttcttcacacatagaacgctctcctaccatgacacttttgtgtcatccacagcttcggtaatatgttttagccccggtacattttcggcgcagggtcactcgactagtgagctattacgcactctttgaatgaatagctgcttctaagctaacatcctagttgtctgtgcaaccccacatccttttccacttaacatatattttgggaccttagctggtggtctgggctgtttccctttcgactacggatcttagcactcgcagtctgactgccgattatatctcgttggcattcggagtttatctgagattggtaatccgggatggacccctcacccaaacagtgctctacctccaagagacttaacatcgacgctagccctaaagctatttcggagagaaccagctatctccaagttcgtttggaatttctccgctacccacaagtcatccaagcacttttcaacgtgccctggttcggtcctccagtgagttttacctcaccttcaacctgctcatgggtaggtcacatggtttcgggtctacaacatgatactatgacgccctattaagactcggtttccctacggctccgtctcttcaacttaacctcgcatcatatcgtaactcgccggttcattctacaaaaggcacgctctcacccattaacgggctcgaacttgttgtaggcacacggtttcaggttctatttcactcccctcccggggtgcttttcacctttccctcacggtactggttcactatcggtcactagagagtatttagggttgggagatggtcctcccagattccgacgagatttcgcgtgtctcgccgtactcaggatactgctaaggttaatctatcattttaaatacgaggctgttactctctttggcttaccttcccaggtaattcttctataatgattaatcctatatcgcagtcctacaaccccgaagtgtaaacacttcggtttgccctcctgccgtttcgctcgccgctactaaggcaatcgcttttgctttctcttcctgcagctacttagatgtttcagttcactgcgtcttccttctcatatccttaacagatatggatactagtcattaactagtgggttcccccattcggacatctctggatcagcgcttacttacagctccccaaagcatttcgtcgttagtcacgtccttcttcggcttctagtgccaaggcatccaccgtgcgcccttattaacttaaccttattaacctagtttctttaaaactagaaaactcattaaatattcacagcgttttcggtttattttcttgttactttctacaatctatttctagatcgtggaatttgatatagatattcaattttcaatgaacaatttgaacctttcgattcaatggagcctagcgggatcgaaccgctgacctcctgcgtgcaaagcaggcgctctcccagctgagctaaggccccacaagacctctcaaaactaaacaagacgcaaatggcaggtttccttatccttagaaaggaggtgatccagccgcaccttccgatacggctaccttgttacgacttcaccccaatcatctatcccaccttaggcggctggctcctaaaaggttacctcaccgacttcgggtgttacaaactctcgtggtgtgacgggcggtgtgtacaaggcccgggaacgtattcaccgcggcgtgctgatccgcgattactagcgattccgacttcatgtaggcgagttgcagcctacaatccgaactgagattggctttaagagattagcttgccgtcaccggcttgcgactcgttgtaccaaccattgtagcacgtgtgtagcccaggtcataaggggcatgatgatttgacgtcatccccaccttcctccggtttattaccggcagtctcgctagagtgcccaacttaatgatggcaactaacaataggggttgcgctcgttgcgggacttaacccaacatctcacgacacgagctgacgacaaccatgcaccacctgtcacttctgctccgaagagaaagcctatctctaggccggtcagaaggatgtcaagacctggtaaggttcttcgcgttgcttcgaattaaaccacatgctccaccgcttgtgcgggcccccgtcaattcctttgagtttcaaccttgcggtcgtactccccaggcggagtgcttaatgcgttagctgcggcactaagccccggaaagggcctaacacctagcactcatcgtttacggcgtggactaccagggtatctaatcctgtttgctccccacgctttcgagcctcagcgtcagttacagaccagagagccgctttcgccaccggtgttcctccatatatctacgcatttcaccgctacacatggaattccactctccccttctgcactcaagtcctccagtttccaaagcgtacaatggttaagccactgcctttaacttcagacttaaagaaccgcctgcgctcgctttacgcccaataaatccggacaacgctcgggacctacgtattaccgcggctgctggcacgtagttagccgtccctttctggttagttaccgtcacttggtagattttccactcctaccaacgttcttctctaacaacagagctttacgatccgaaaaccttcttcactcacgcggcgttgctcggtcagacttccgtccattgccgaagattccctactgctgcctcccgtaggagtctgggccgtgtctcagtcccagtgtggccgatcaccctctcaggtcggctatgtatcgtcgccttggtgagcctttacctcaccaactagctaatacaacgcaggtccatctcacagtgaagcaattgctccttttaaataactaacatgtgttaattactcttatgcggtattagctatcgtttccaatagttatcccccgctatgaggcaggttacctacgcgttactcacccgttcgcaactcatcagtctagtgtaaacaccaaacctcagcgttctacttgcatgtattaggcacgccgccagcgttcgtcctgagccaggatcaaactctcattaaaagtttgagctttgctcttttctgtctcgctgacagatttattgtttttttgtcattgacggatttacaatgtaaatccaccctgcacattcgttcgtcttgttcagttttcaaaggtctttgcctctcttgagacaacttctatattctagcaaacttattctgctttgtcaactactttttttaagttgttaactacgcgctaatagaaactgctctctcgagacaacttatttagtttactacatcatctcttactttgtcaactcttttttcatactttttctacattttctgaaaatgtagatagagcgcaagaaaaaaagaggtctcacctctttttatttcttagtaactactacaaatctattaggatcgttaccttcagaataactttcaacaccctctatagttgcaattgttttatgaacagtttttcgctcactgttactcataggatccatatggtaaggttcattagtctctaaaacacgcctagctatttttttagaaaaatcaattaaagtttctgtacgatgctcaacgtagtcatggacattaatggatactgaaaaactcttagaaaagcggtcatgaagataattttgtgctaacaactgcaacgattttaatacttttccatgataaccaatgatgcgcccagcttctggcgtttctatttggagatttatttgtcgcttacttgtcgtagtttctattgttgcatctaaatccatctcatagatgatattttcaacgtatttagtcacctgagcagctgctacttcaatattaggaagtaggtcaattttttcaatagcttcacttgtagttacaacgtttttatcatcaatttttggaagttctggttgtgatacgtcttctttttcaagcgtttcatcaacctcctctatatattcttccaccacatctacgctagacggtacattcttaatattttttaacgctaccgattcattaatatcagttacttcgtcggtgataccttctatttcaacttttgctggctttttaccaaagcccaaaaaaccttttttctcacgtgatacaacttttatatgtgccctcaatcgtgaaatgtttaactcttgtagtcctttttcaatagcttcttctacagtcgctcctgtaaataatacc

SEQ ID NO: 12021 - DNA, 8766 bp, Streptococcus agalactiae
agtacccgtatatttactaggaacaatgacatttactttcccgaattggtctttctatggcttttcacgattaagcatactaactatatcaaagggattgacatagtaggtaacatgcttcccagcttcttggatttttttagcagaaatgccttccattttttccaagcttcttgatacatcagggccatcgaaaaggactacttgaccaacattctccaattctgcatagctaagattaacaactgcttgagaagatacaatcgtaccgagtgagtgaccagtaacatctataatagctccaggcgcttttccttttagctcggcaattttttctttcatagccttattagccaatttcgcttgtggaatatacttgttagagacagcaaacattgcattgttactaacccaatcgtttagtgtatctagaccaatcccatcactaccacgaatggctagataagtgtgctttgtagtgctatctattttttcagtatctgacaggtagtaagcattaaaacctgccttatcgtcagtaagcacacctttttgataagaatgagtaacataatgctcagtgtgatagcctccattgacatctggaatgaggacctttacattttcatcaatagattttaaggacttatctggttgcaggtagacaataccatcattggggaggttagtgccaccctgtgtgatttgacctttgttatcttctgagggttgagaaaattttacttctgttactgagtcagtctcaaataattcaggaaatgaattaggtcgactattatatgcactttctgctaaagagctatgtaagttatcaaaattatctaagttccaattactcaattattcttctcctctaccttgcttgtggtaaaaattctattactttatataggatgattcaagctattcataaatgtgccaaataccatttttatgtatatacggcttatttagcattcccattgatttgatatttgggatatcatttttatgagctaaataaaaatcaactattaattttgaattttgtagatgattaaactttcctctcagtgaaagattataatcacccccttgtggagttccattcccgctttgttctacttttacacttgaccaatcgaattgaacggactcaatttggttgttatgtaattttacataatctatgatttcttgctcatgctctttgagataggctaattgttctttttttgtcatttttttatctttcttcacttctgattgcttgctattttttacttcgtttgactgaattttatgttcactattcatttgacagcctccaagtatcatcccaaaaattgatatgggaattaaccattttatatattttctcatcatgttctcttttcttagaatataaattttatatatcaagtatataatgaaattaactattattcaccaacattataaaattaattttagtataacaaaattttcacgtatttttatagttttagtcttaacatgtaaacagaaaatcatttgtatattttaaatgccctaattaaattaataattaatatttattattatataaattcttctacaatgaaaaaaataaatatatattacaagtaacatttcacaataaattatctagtagaaaaaagacaaggtttagaaaccttgtctttataagtataccggcggccggggtcgaaccggcacgtccgtgaggacactggattttgagtccagcgcgtctgccaattccgccacgccggctatcttaaaactggggtagctggattcgaaccaacgcatgagggagtcaaagtcccttgccttaccgcttggctataccccatgaaaaggcgagtgatgggaatcgaacccacgaatgtcagagccacaatctgatgtgttaaccacttcaccacacccgccatattagaaaaaacacgggcagtaggaatcgaacccacactgaaggttttggagaccttagttctacctttaaactatgcccgtttactatggagagagagggattcgaacccccgaacccgaaggagcggatttacagtccgccgcgtttagcctcttcgctatctctcctaaggtataaatggcgcgagacggaatcgaaccgccgacacatggagcttcaatccattgctctaccaactgagctaccgagcctattgcgggagcaggatttgaacctacgaccttcgggttatgagcccgacgagctacctagctgctccatcccgcgatatctttaaaggaggatgtgggattcgaacccacgcacgcttttacacgcctgacggttttcaagaccgttcccttcagccggacttgggtaatcctccatataacaaaaaatagtccgtacgggattcgaacccgtgttaccgccgtgaaaaggcggtgtcttaaccccttgaccaacggaccatattcttgatgggcacgagtggactcgaaccaccgacctcacgcttatcaggcgtgcgctctaaccacctgagctacgcgcccaagctattgcttggtttttactttcttataaagtaaagcgggtgacgagaatcgaactcgcgacaacagcttggaaggctgtagttttaccactaaactacacccgcttctatgggagttaacgggatcgaaccgctgaccctctgcttgtaaggcagatgctctcccagctgagctaaactccctttgctaagcgactaccttatctcacagggggcaacccccaactacttccggcgttctagggcttaacttctgtgttcggcatgagaacaggtgtatctcctaggcaattatcacttaactattgagccttattcactcaaaattgaatatctatagtctaacaagaaaccgtaacgttgtcaatatctctttttggataagtcctcgagctattagtattagtccgctaaatgtgtcaccacaattacactcctaacctatctacctgatcatctctcagggctcttactgatataaaatcatgggaaatctcatcttgaggtgggcttcgcacttagatgctttcagcgcttatcccttccctacatagctacccagcgatgcctttggcaagacaactggtacaccagcggtaagtccactctggtcctctcgtactaggagcagatcctctcaaatttcctacgcccgcgacggatagggaccgaactgtctcacgacgttctgaacccagctcgcgtgccgctttaatgggcgaacagcccaacccttgggaccgactacagccccaggatgcgacgagccgacatcgaggtgccaaacctccccgtcgatgtgaactcttgggggagataagcctgttatccccagggtagcttttatccgttgagcgatggcccttccatacggaaccaccggatcactaagcccgactttcgtccctgctcgagttgtagctctcgcagtcaagctcccttatacctttacactctacgactgatttccaaccagtctgagggaacctttgggcgcctccgttaccttttaggaggcgaccgccccagtcaaactgcccgtcagacactgtctccgatagggattgcctatctgggttagagtagccataacacaagggtagtatcccaacaacgcctcaaacgaaactggcgtcccgttatcataggctcctacctatcctgtacatgtggtacagatactcaatatcaaactgcagtaaagctccatggggtctttccgtcctgtcgcgggtaacctgcatcttcacaggtactaaaatttcaccgagtctctcgttgagacagtgcccaaatcattacgcctttcgtgcgggtcggaacttacccgacaaggaatttcgctaccttaggaccgttatagttacggccgccgtttactggggcttcaattcataccttcgcttacgctaagcactcctcttaaccttccagcaccgggcaggcgtcaccccctatacatcatcttacgatttagcagagagctgtgtttttgataaacagttgcttgggcctattcactgcggctgatctaaaatcagcgccccttctcccgaagttacggggccattttgccgagttccttaacgagagttctctcgctcacctgaggctactcgcctcgactacctgtgtcggtttgcggtacgggtagagtatatgtatcgctagaagcttttcttggcagtgtgacatcactaacttcgctactaaacttcgctcctcgtcacagctcaatgttaaagatataagcatttgactcatatcacacctcactgtttgaccagacacttccaatcgtctggtttagttagcctactgcgtccctccatcactatatactctagtacaggaatatcaacctgttgtccatcggatacacctttcggtctctccttaggtcccgactaacccagggcggacgagccttcccctggaaaccttagtcttacggtggacaggattctcacctgtcttgcgctactcataccggcattctcacttctatgcgttccagcgctcctcacggtacaccttcttcacacatagaacgctctcctaccatgacacttttgtgtcatccacagcttcggtaatatgttttagccccggtacattttcggcgcagggtcactcgactagtgagctattacgcactctttgaatgaatagctgcttctaagctaacatcctagttgtctgtgcaaccccacatccttttccacttaacatatattttgggaccttagctggtggtctgggctgtttccctttcgactacggatcttagcactcgcagtctgactgccgattatatctcgttggcattcggagtttatctgagattggtaatccgggatggacccctcacccaaacagtgctctacctccaagagacttaacatcgacgctagccctaaagctatttcggagagaaccagctatctccaagttcgtttggaatttctccgctacccacaagtcatccaagcacttttcaacgtgccctggttcggtcctccagtgagttttacctcaccttcaacctgctcatgggtaggtcacatggtttcgggtctacaacatgatactatgacgccctattaagactcggtttccctacggctccgtctcttcaacttaacctcgcatcatatcgtaactcgccggttcattctacaaaaggcacgctctcacccattaacgggctcgaacttgttgtaggcacacggtttcaggttctatttcactcccctcccggggtgcttttcacctttccctcacggtactggttcactatcggtcactagagagtatttagggttgggagatggtcctcccagattccgacgagatttcgcgtgtctcgccgtactcaggatactgctaaggttaatctatcattttaaatacgaggctgttactctctttggcttaccttcccaggtaattcttctataatgattaatcctatatcgcagtcctacaaccccgaagtgtaaacacttcggtttgccctcctgccgtttcgctcgccgctactaaggcaatcgcttttgctttctcttcctgcagctacttagatgtttcagttcactgcgtcttccttctcatatccttaacagatatggatactagtcattaactagtgggttcccccattcggacatctctggatcagcgcttacttacagctccccaaagcatttcgtcgttagtcacgtccttcttcggcttctagtgccaaggcatccaccgtgcgcccttattaacttaaccttattaacctagtttctttaaaactagaaaactcattaaatattcacagcgttttcggtttattttcttgttactttctacaatctatttctagatcgtggaatttgatatagatattcaattttcaatgaacaatttgaacctttcgattcaatggagcctagcgggatcgaaccgctgacctcctgcgtgcaaagcaggcgctctcccagctgagctaaggccccacaagacctctcaaaactaaacaagacgcaaatggcaggtttccttatccttagaaaggaggtgatccagccgcaccttccgatacggctaccttgttacgacttcaccccaatcatctatcccaccttaggcggctggctcctaaaaggttacctcaccgacttcgggtgttacaaactctcgtggtgtgacgggcggtgtgtacaaggcccgggaacgtattcaccgcggcgtgctgatccgcgattactagcgattccgacttcatgtaggcgagttgcagcctacaatccgaactgagattggctttaagagattagcttgccgtcaccggcttgcgactcgttgtaccaaccattgtagcacgtgtgtagcccaggtcataaggggcatgatgatttgacgtcatccccaccttcctccggtttattaccggcagtctcgctagagtgcccaacttaatgatggcaactaacaataggggttgcgctcgttgcgggacttaacccaacatctcacgacacgagctgacgacaaccatgcaccacctgtcacttctgctccgaagagaaagcctatctctaggccggtcagaaggatgtcaagacctggtaaggttcttcgcgttgcttcgaattaaaccacatgctccaccgcttgtgcgggcccccgtcaattcctttgagtttcaaccttgcggtcgtactccccaggcggagtgcttaatgcgttagctgcggcactaagccccggaaagggcctaacacctagcactcatcgtttacggcgtggactaccagggtatctaatcctgtttgctccccacgctttcgagcctcagcgtcagttacagaccagagagccgctttcgccaccggtgttcctccatatatctacgcatttcaccgctacacatggaattccactctccccttctgcactcaagtcctccagtttccaaagcgtacaatggttaagccactgcctttaacttcagacttaaagaaccgcctgcgctcgctttacgcccaataaatccggacaacgctcgggacctacgtattaccgcggctgctggcacgtagttagccgtccctttctggttagttaccgtcacttggtagattttccactcctaccaacgttcttctctaacaacagagctttacgatccgaaaaccttcttcactcacgcggcgttgctcggtcagacttccgtccattgccgaagattccctactgctgcctcccgtaggagtctgggccgtgtctcagtcccagtgtggccgatcaccctctcaggtcggctatgtatcgtcgccttggtgagcctttacctcaccaactagctaatacaacgcaggtccatctcacagtgaagcaattgctccttttaaataactaacatgtgttaattactcttatgcggtattagctatcgtttccaatagttatcccccgctatgaggcaggttacctacgcgttactcacccgttcgcaactcatcagtctagtgtaaacaccaaacctcagcgttctacttgcatgtattaggcacgccgccagcgttcgtcctgagccaggatcaaactctcattaaaagtttgagctttgctcttttctgtctcgctgacagatttattgtttttttgtcattgacggatttacaatgtaaatccaccctgcacattcgttcgtcttgttcagttttcaaaggtctttgcctctcttgagacaacttctatattctagcaaacttattctgctttgtcaactactttttttaagttgttaactacgcgctaatagaaactgctctctcgagacaacttatttagtttactacatcatctcttactttgtcaactcttttttcatactttttctacattttctgaaaatgtagatcaggctcaagcttaacgattctttttaaaatcattaaattttaaaacaaatttcagacatgttgccaaagttttgatattattactataatatagtttgtagaggagaataatatgggccaagaacctatcatcgaatatcaaaatatcaataaagtgtatggggaaaatgttgcggttgaagacattaaccttaaaatttaccctggtgattttgtttgtttcatcggtacgagtggatcaggtaaaacaacattaatgcgtatggttaaccatatgttaaaaccaacaaatggtactctattatttaagggaaaagatatttctactattaaccccattgaattaagacgcagaattggatatgttatccaaaacattggtttaatgcctcatatgaccatttacgaaaatatagttcttgtaccaaaattattgaaatggtcagaagaagctaaaagagctaaagcaagggaacttattaaattagttgaattacccgaagaatatttggatcgctaccctagtgagttgtctggcggtcagcaacaacgtatcggtgtcattcgcgctcttgcagcagaccaagatattattttaatggatgagccttttggagctctggatcctattactagagaaggtattcaagacttagtcaagtctcttcaggaagaaatggggaaaactatcatcttagttactcatgatatggatgaagccctcaagttagcaacaaaaattattgttatggacaatggtaaaatggtccaagaagggacacccaatgatctcttacatcatcctgcta

SEQ ID NO: 12022 - DNA, 8064 bp, Streptococcus agalactiae
cttctttgttttctttagagatattaactgtacccactttgggcgttaaaatacctaaagtagcctttattaaagttgatttagcagccccattttcacctgttaaggtaacaaactccccactgtctaaatggtaattaaccccttccagcacaggatcgctatcgtactgaaaagtaagaccactaactgtaatatatcgcatgattacccttctaattctctagagaaaagatcaagaaaacgttctaaaacgaccttttcgtcctttgaaaaatgatttactaatcttccgtaaacccctaacgtattgtcatgatgatgtgtgtgttcatctgcaatgggtttagcaagttcagataactcaaaataagtaatacgagcatctttagaatctttattcgctttcaacatatcctgagaaattaaactttttactgctttagttacagctgcctgactaatatttaacttcttagctaaatcagaatttgtcaactgctcttgtgataaaagcatcagaatgtgttcttgcgtattagtcaatttaacatcactttgacaagtaccaaacaataattcatgttgattttctgctttaagcaagatttgactcactaaatggtctaatttttgttctaaaactgtcatatatacctcttttttgttaaccagtaaattatatcacgaagatatagaagaatcaatcatagataggtgaagaagataaaaccttttatctcaacaacctaactttataaacttctttgcaaaaacctttcatactattaaaaacacgatcagcttttttctctgtagaacacattgaaaaaacagttggtccacttcctgtcattaatgcaacatcggctccagaatttaacatacgttcttttattgtacttataactggatttttagtaattgtaatatcctcgagtgaatttcccatagatttgaccattaactgataatctgatgacaaaatagcagactttaataaatcaatatcaactctacttatagacttacaatcaatatctctaaaaatggatttagttgaaataccaaaatccggcttaaccagaactatccaacatggtctcaatgtcggtaagggtttaacaatttcacctttacctaatactaacgaacatcccccaccaagacaataaggaacatcactaccaattttaaaaccaatagcaaccatttcgtcatagtccatttgaagattccataatcgattaagagctcttattgtagcagcagcatcagtagaaccaccccccagtcctgcacagacaggaatggatttttctaatctaatatgaacacctttattaataccatattgatttttgattatatctgcagctttaaacacatcattatcattatttaaaggcattttgctactatcagaatcgataacaatacaatcttcctttagctcagaaatggtaacgtagtcattaagatcaatactaaccataatcatagctaattcatgataaccatcgtcacatcgtcctttaatatctaatcctaaattaagtttggcaggagctttctcaaaaattttcataaaacctccctaataaaatatagaatatccatattataacataacaaatgacaaattcggacaattaagatgctagccaatcttaaggataataattccaataaaaaaaggctaaccaaagttagtctccctttatctactccgccagtaggactcgaacctacgacatcatgattaacagtcatgcgctactaccaactgagctatggcggattatagctaagcgactaccttatctcacagggggcaacccccaactacttccggcgttctagggcttaacttctgtgttcggcatgagaacaggtgtatctcctaggcaattatcacttaactattgagccttattcactcaaaattgaatatctatagtctaacaagaaaccgtaacgttgtcaatatctctttttggataagtcctcgagctattagtattagtccgctaaatgtgtcaccacaattacactcctaacctatctacctgatcatctctcagggctcttactgatataaaatcatgggaaatctcatcttgaggtgggcttcgcacttagatgctttcagcgcttatcccttccctacatagctacccagcgatgcctttggcaagacaactggtacaccagcggtaagtccactctggtcctctcgtactaggagcagatcctctcaaatttcctacgcccgcgacggatagggaccgaactgtctcacgacgttctgaacccagctcgcgtgccgctttaatgggcgaacagcccaacccttgggaccgactacagccccaggatgcgacgagccgacatcgaggtgccaaacctccccgtcgatgtgaactcttgggggagataagcctgttatccccagggtagcttttatccgttgagcgatggcccttccatacggaaccaccggatcactaagcccgactttcgtccctgctcgagttgtagctctcgcagtcaagctcccttatacctttacactctacgactgatttccaaccagtctgagggaacctttgggcgcctccgttaccttttaggaggcgaccgccccagtcaaactgcccgtcagacactgtctccgatagggattgcctatctgggttagagtagccataacacaagggtagtatcccaacaacgcctcaaacgaaactggcgtcccgttatcataggctcctacctatcctgtacatgtggtacagatactcaatatcaaactgcagtaaagctccatggggtctttccgtcctgtcgcgggtaacctgcatcttcacaggtactaaaatttcaccgagtctctcgttgagacagtgcccaaatcattacgcctttcgtgcgggtcggaacttacccgacaaggaatttcgctaccttaggaccgttatagttacggccgccgtttactggggcttcaattcataccttcgcttacgctaagcactcctcttaaccttccagcaccgggcaggcgtcaccccctatacatcatcttacgatttagcagagagctgtgtttttgataaacagttgcttgggcctattcactgcggctgatctaaaatcagcgccccttctcccgaagttacggggccattttgccgagttccttaacgagagttctctcgctcacctgaggctactcgcctcgactacctgtgtcggtttgcggtacgggtagagtatatgtatcgctagaagcttttcttggcagtgtgacatcactaacttcgctactaaacttcgctcctcgtcacagctcaatgttaaagatataagcatttgactcatatcacacctcactgtttgaccagacacttccaatcgtctggtttagttagcctactgcgtccctccatcactatatactctagtacaggaatatcaacctgttgtccatcggatacacctttcggtctctccttaggtcccgactaacccagggcggacgagccttcccctggaaaccttagtcttacggtggacaggattctcacctgtcttgcgctactcataccggcattctcacttctatgcgttccagcgctcctcacggtacaccttcttcacacatagaacgctctcctaccatgacacttttgtgtcatccacagcttcggtaatatgttttagccccggtacattttcggcgcagggtcactcgactagtgagctattacgcactctttgaatgaatagctgcttctaagctaacatcctagttgtctgtgcaaccccacatccttttccacttaacatatattttgggaccttagctggtggtctgggctgtttccctttcgactacggatcttagcactcgcagtctgactgccgattatatctcgttggcattcggagtttatctgagattggtaatccgggatggacccctcacccaaacagtgctctacctccaagagacttaacatcgacgctagccctaaagctatttcggagagaaccagctatctccaagttcgtttggaatttctccgctacccacaagtcatccaagcacttttcaacgtgccctggttcggtcctccagtgagttttacctcaccttcaacctgctcatgggtaggtcacatggtttcgggtctacaacatgatactatgacgccctattaagactcggtttccctacggctccgtctcttcaacttaacctcgcatcatatcgtaactcgccggttcattctacaaaaggcacgctctcacccattaacgggctcgaacttgttgtaggcacacggtttcaggttctatttcactcccctcccggggtgcttttcacctttccctcacggtactggttcactatcggtcactagagagtatttagggttgggagatggtcctcccagattccgacgagatttcgcgtgtctcgccgtactcaggatactgctaaggttaatctatcattttaaatacgaggctgttactctctttggcttaccttcccaggtaattcttctataatgattaatcctatatcgcagtcctacaaccccgaagtgtaaacacttcggtttgccctcctgccgtttcgctcgccgctactaaggcaatcgcttttgctttctcttcctgcagctacttagatgtttcagttcactgcgtcttccttctcatatccttaacagatatggatactagtcattaactagtgggttcccccattcggacatctctggatcagcgcttacttacagctccccaaagcatttcgtcgttagtcacgtccttcttcggcttctagtgccaaggcatccaccgtgcgcccttattaacttaaccttattaacctagtttctttaaaactagaaaactcattaaatattcacagcgttttcggtttattttcttgttactttctacaatctatttctagatcgtggaatttgatatagatattcaattttcaatgaacaatttgaacctttcgattcaatggagcctagcgggatcgaaccgctgacctcctgcgtgcaaagcaggcgctctcccagctgagctaaggccccacaagacctctcaaaactaaacaagacgcaaatggcaggtttccttatccttagaaaggaggtgatccagccgcaccttccgatacggctaccttgttacgacttcaccccaatcatctatcccaccttaggcggctggctcctaaaaggttacctcaccgacttcgggtgttacaaactctcgtggtgtgacgggcggtgtgtacaaggcccgggaacgtattcaccgcggcgtgctgatccgcgattactagcgattccgacttcatgtaggcgagttgcagcctacaatccgaactgagattggctttaagagattagcttgccgtcaccggcttgcgactcgttgtaccaaccattgtagcacgtgtgtagcccaggtcataaggggcatgatgatttgacgtcatccccaccttcctccggtttattaccggcagtctcgctagagtgcccaacttaatgatggcaactaacaataggggttgcgctcgttgcgggacttaacccaacatctcacgacacgagctgacgacaaccatgcaccacctgtcacttctgctccgaagagaaagcctatctctaggccggtcagaaggatgtcaagacctggtaaggttcttcgcgttgcttcgaattaaaccacatgctccaccgcttgtgcgggcccccgtcaattcctttgagtttcaaccttgcggtcgtactccccaggcggagtgcttaatgcgttagctgcggcactaagccccggaaagggcctaacacctagcactcatcgtttacggcgtggactaccagggtatctaatcctgtttgctccccacgctttcgagcctcagcgtcagttacagaccagagagccgctttcgccaccggtgttcctccatatatctacgcatttcaccgctacacatggaattccactctccccttctgcactcaagtcctccagtttccaaagcgtacaatggttaagccactgcctttaacttcagacttaaagaaccgcctgcgctcgctttacgcccaataaatccggacaacgctcgggacctacgtattaccgcggctgctggcacgtagttagccgtccctttctggttagttaccgtcacttggtagattttccactcctaccaacgttcttctctaacaacagagctttacgatccgaaaaccttcttcactcacgcggcgttgctcggtcagacttccgtccattgccgaagattccctactgctgcctcccgtaggagtctgggccgtgtctcagtcccagtgtggccgatcaccctctcaggtcggctatgtatcgtcgccttggtgagcctttacctcaccaactagctaatacaacgcaggtccatctcacagtgaagcaattgctccttttaaataactaacatgtgttaattactcttatgcggtattagctatcgtttccaatagttatcccccgctatgaggcaggttacctacgcgttactcacccgttcgcaactcatcagtctagtgtaaacaccaaacctcagcgttctacttgcatgtattaggcacgccgccagcgttcgtcctgagccaggatcaaactctcattaaaagtttgagctttgctcttttctgtctcgctgacagatttattgttttttgtcattgacggatttacaatgtaaatccaccctgcacattcgttcgtcttgttcagttttcaaaggtctttgcctctcttgagacaacttctatattctagcaaacttattctgctttgtcaactactttttttaagttgttaactacgcgctaatagaaactgctctctcgagacaacttatttagtttactacatcatctcttactttgtcaactcttttttcatactttttctacattttctgaaaaaagtttcctgttggctaacaccaataacatagagtttaaaattccatacctaaatttattttattagtaaaaaaataaaagatgggctagccatcttttataatatttgttttttatattcttcagcttcttggggtgtagataaaacaaaatgaccaggggtaatctcgtgcatttgacgttcttgtccgtcttgctcaatagctggattatacggctggtgaacacgttgacgttcactctccggatctggttctggaatagctgataatagactcttcgtataagggtggattggattgttataaacatcatcagatgttccaacttctaacagtttcccccaatgcataacaccgatacgatctgaaatgtattttaccatagacaaatcatgtgcgataaacaaataagtcaatccttgttctctttgcaatttttgcattaaattaacaacttgtgcttggattgaaacatctaaggcagatattggttcatcagcaatgataaatttaggctctactgctaaagcacgtgcaatcccgatacgttgtcgttgtccacctgaaaattcatgcggataacgtgttaaatgatctttatttaaccctacaagatctaatagggcctgaactttactatcacgatctgattttgatttagctaatttatgtatatctaaaccttctgctacgatatcacgaatcttcatacggccgtttaagctagcctgaggatcctgaaaaatcatctgagcgtctttacgaaaactatgtaatgctttacctttcagatgtgagatcacttctccattaaaggtaatttctccatcagaaatatcataaagttttaaaattgaacgtccaacggttgtctttcctgatccagattccccaactaatccaaacacttcaccttcataaatgtcaaaactaacattatcaattgctctcacttcattagcttttcctttattgaaggtcaaagaaacatttttgacttcaactaatttttttcgattttcagtcattaggct

SEQ ID NO: 12023 - DNA, 7250 bp, Streptococcus agalactiae
tttcgagtcaaagtcatcagcgtttactgttacggcagcagttccaagagttactccactcacaaggactgctgataatattctttttttcatttttattaaactactcctttacgataagacattaaatattttaccaaaaaattcacgaaattatattacgtcattgttacatttatatttgaaatcaactatttctaaatgaaccataatcaaatctagaaaacgataaccttcttctattcactctatcaatataattactccatagtgaaactaaaagagaaataaaaaaagagtataattactcttaaaattataatatttacggagaataagggattcgaacccttgcgccagttacccgacctaacgatttagcaaaccgtcctcttcagcctcttgagtaattctccaaattaatattaatgggcacgagtggactcgaaccaccgacctcacgcttatcaggcgtgcgctctaaccacctgagctacgcgcccaagcaaatgcttggttttacttttatgtaaagtaagcgggtgacgagaatcgaactcgcgacaacagcttggaaggctgtagttttaccactaaactacacccgctaaaaacttatataataaatggcgcgagacggaatcgaaccgccgacacatggagcttcaatccattgctctaccaactgagctaccgagcctattgcgggagcaggatttgaacctacgaccttcgggttatgagcccgacgagctacctagctgctccatcccgcgatatctttaaaggaggatgtgggattcgaacccacgcacgcttttacacgcctgacggttttcaagaccgttcccttcagccggacttgggtaatcctccatataacaaaaaatatggaccttgtaggactcgaacctacgaccgctcggttatgagccgagtgctctaaccagttgagctaaaggtccaaagtctcaataaaataaatagcggcggaggggatcgaacccccgacctcccgggtatgaaccggacgctctagccagctgagctacaccgccataaaaatatatccatcgggaagacaggattcgaacctgcgacaccttggtcccaaaccaagtactctaccaagctgagctacttcccgaaaaatatgcaccctagaggagtcgaacctctaaccgcctgattcgtagtcaggtactctatccagttgagctaagggtgctaaatattatatgccgaggaccggaatcgaaccggtacgatgtttaccatcgcaggattttaagtcctgtgcgtctgccagttccgccaccccggcctctaacaagcgaacgacggggttcgaacccgcgaccctcaccttggcaaggtgatgttctaccactgaactacgttcgcactaaagacactatttatcctataaaattgtaatgccggctacatgacttgaacacgcgaccctctgattacaaatcagatgctctaccaactgagctaagccggcaatctactaatgcgggtgaagggacttgaacccccacgccgttaagcgccagatcctaaatctggtgcgtctgccaattccgccacacccgcatttctaaatgacccgtactgggctcgaaccagtgacccattgattaaaagtcaattgctctaccaactgagctaacgagtctacggtcccgacgggaatcgaacccgcgatcttcgccgtgacagggcgacgtgataaccgctacactacgggacctatgggagttaacgggatcgaaccgctgaccctctgcttgtaaggcagatgctctcccagctgagctaaactccctttgctaagcgactaccttatctcacagggggcaacccccaactacttccggcgttctagggcttaacttctgtgttcggcatgagaacaggtgtatctcctaggcaattatcacttaactattgagccttattcactcaaaattgaatatctatagtctaacaagaaaccgtaacgttgtcaatatctctttttggataagtcctcgagctattagtattagtccgctaaatgtgtcaccacaattacactcctaacctatctacctgatcatctctcagggctcttactgatataaaatcatgggaaatctcatcttgaggtgggcttcgcacttagatgctttcagcgcttatcccttccctacatagctacccagcgatgcctttggcaagacaactggtacaccagcggtaagtccactctggtcctctcgtactaggagcagatcctctcaaatttcctacgcccgcgacggatagggaccgaactgtctcacgacgttctgaacccagctcgcgtgccgctttaatgggcgaacagcccaacccttgggaccgactacagccccaggatgcgacgagccgacatcgaggtgccaaacctccccgtcgatgtgaactcttgggggagataagcctgttatccccagggtagcttttatccgttgagcgatggcccttccatacggaaccaccggatcactaagcccgactttcgtccctgctcgagttgtagctctcgcagtcaagctcccttatacctttacactctacgactgatttccaaccagtctgagggaacctttgggcgcctccgttaccttttaggaggcgaccgccccagtcaaactgcccgtcagacactgtctccgatagggattgcctatctgggttagagtagccataacacaagggtagtatcccaacaacgcctcaaacgaaactggcgtcccgttatcataggctcctacctatcctgtacatgtggtacagatactcaatatcaaactgcagtaaagctccatggggtctttccgtcctgtcgcgggtaacctgcatcttcacaggtactaaaatttcaccgagtctctcgttgagacagtgcccaaatcattacgcctttcgtgcgggtcggaacttacccgacaaggaatttcgctaccttaggaccgttatagttacggccgccgtttactggggcttcaattcataccttcgcttacgctaagcactcctcttaaccttccagcaccgggcaggcgtcaccccctatacatcatcttacgatttagcagagagctgtgtttttgataaacagttgcttgggcctattcactgcggctgatctaaaatcagcgccccttctcccgaagttacggggccattttgccgagttccttaacgagagttctctcgctcacctgaggctactcgcctcgactacctgtgtcggtttgcggtacgggtagagtatatgtatcgctagaagcttttcttggcagtgtgacatcactaacttcgctactaaacttcgctcctcgtcacagctcaatgttaaagatataagcatttgactcatatcacacctcactgtttgaccagacacttccaatcgtctggtttagttagcctactgcgtccctccatcactatatactctagtacaggaatatcaacctgttgtccatcggatacacctttcggtctctccttaggtcccgactaacccagggcggacgagccttcccctggaaaccttagtcttacggtggacaggattctcacctgtcttgcgctactcataccggcattctcacttctatgcgttccagcgctcctcacggtacaccttcttcacacatagaacgctctcctaccatgacacttttgtgtcatccacagcttcggtaatatgttttagccccggtacattttcggcgcagggtcactcgactagtgagctattacgcactctttgaatgaatagctgcttctaagctaacatcctagttgtctgtgcaaccccacatccttttccacttaacatatattttgggaccttagctggtggtctgggctgtttccctttcgactacggatcttagcactcgcagtctgactgccgattatatctcgttggcattcggagtttatctgagattggtaatccgggatggacccctcacccaaacagtgctctacctccaagagacttaacatcgacgctagccctaaagctatttcggagagaaccagctatctccaagttcgtttggaatttctccgctacccacaagtcatccaagcacttttcaacgtgccctggttcggtcctccagtgagttttacctcaccttcaacctgctcatgggtaggtcacatggtttcgggtctacaacatgatactatgacgccctattaagactcggtttccctacggctccgtctcttcaacttaacctcgcatcatatcgtaactcgccggttcattctacaaaaggcacgctctcacccattaacgggctcgaacttgttgtaggcacacggtttcaggttctatttcactcccctcccggggtgcttttcacctttccctcacggtactggttcactatcggtcactagagagtatttagggttgggagatggtcctcccagattccgacgagatttcgcgtgtctcgccgtactcaggatactgctaaggttaatctatcattttaaatacgaggctgttactctctttggcttaccttcccaggtaattcttctataatgattaatcctatatcgcagtcctacaaccccgaagtgtaaacacttcggtttgccctcctgccgtttcgctcgccgctactaaggcaatcgcttttgctttctcttcctgcagctacttagatgtttcagttcactgcgtcttccttctcatatccttaacagatatggatactagtcattaactagtgggttcccccattcggacatctctggatcagcgcttacttacagctccccaaagcatttcgtcgttagtcacgtccttcttcggcttctagtgccaaggcatccaccgtgcgcccttattaacttaaccttattaacctagtttctttaaaactagaaaactcattaaatattcacagcgttttcggtttattttcttgttactttctacaatctatttctagatcgtggaatttgatatagatattcaattttcaatgaacaatttgaacctttcgattcaatggagcctagcgggatcgaaccgctgacctcctgcgtgcaaagcaggcgctctcccagctgagctaaggccccacaagacctctcaaaactaaacaagacgcaaatggcaggtttccttatccttagaaaggaggtgatccagccgcaccttccgatacggctaccttgttacgacttcaccccaatcatctatcccaccttaggcggctggctcctaaaaggttacctcaccgacttcgggtgttacaaactctcgtggtgtgacgggcggtgtgtacaaggcccgggaacgtattcaccgcggcgtgctgatccgcgattactagcgattccgacttcatgtaggcgagttgcagcctacaatccgaactgagattggctttaagagattagcttgccgtcaccggcttgcgactcgttgtaccaaccattgtagcacgtgtgtagcccaggtcataaggggcatgatgatttgacgtcatccccaccttcctccggtttattaccggcagtctcgctagagtgcccaacttaatgatggcaactaacaataggggttgcgctcgttgcgggacttaacccaacatctcacgacacgagctgacgacaaccatgcaccacctgtcacttctgctccgaagagaaagcctatctctaggccggtcagaaggatgtcaagacctggtaaggttcttcgcgttgcttcgaattaaaccacatgctccaccgcttgtgcgggcccccgtcaattcctttgagtttcaaccttgcggtcgtactccccaggcggagtgcttaatgcgttagctgcggcactaagccccggaaagggcctaacacctagcactcatcgtttacggcgtggactaccagggtatctaatcctgtttgctccccacgctttcgagcctcagcgtcagttacagaccagagagccgctttcgccaccggtgttcctccatatatctacgcatttcaccgctacacatggaattccactctccccttctgcactcaagtcctccagtttccaaagcgtacaatggttaagccactgcctttaacttcagacttaaagaaccgcctgcgctcgctttacgcccaataaatccggacaacgctcgggacctacgtattaccgcggctgctggcacgtagttagccgtccctttctggttagttaccgtcacttggtagattttccactcctaccaacgttcttctctaacaacagagctttacgatccgaaaaccttcttcactcacgcggcgttgctcggtcagacttccgtccattgccgaagattccctactgctgcctcccgtaggagtctgggccgtgtctcagtcccagtgtggccgatcaccctctcaggtcggctatgtatcgtcgccttggtgagcctttacctcaccaactagctaatacaacgcaggtccatctcacagtgaagcaattgctccttttaaataactaacatgtgttaattactcttatgcggtattagctatcgtttccaatagttatcccccgctatgaggcaggttacctacgcgttactcacccgttcgcaactcatcagtctagtgtaaacaccaaacctcagcgttctacttgcatgtattaggcacgccgccagcgttcgtcctgagccaggatcaaactctcattaaaagtttgagctttgctcttttctgtctcgctgacagatttattgttttttgtcattgacggatttacaatgtaaatccaccctgcacattcgttcgtcttgttcagttttcaaaggtctaatgatatatcataaaaatatatccatcgggaagacaggattcgaacctgcgacaccttggtcccaaaccaagtactctaccaagctgagctacttcccgaaaaatatgcaccctagaggagtcgaacctctaaccgcctgattcgtagtcaggtactctatccagttgagctaagggtgctaaatattatatgccgaggaccggaatcgaaccggtacgatgtttaccatcgcaggattttaagtcctgtgcgtctgccagttccgccaccccggcctctaacaagcgaacgacggggttcgaacccgcgaccctcaccttggcaaggtgatgttctaccactgaactacgttcgcactaaagacactatt

SEQ ID NO: 12024 - DNA, 9042 bp, Streptococcus agalactiae
tatcctataaaattgtaatgccggctacatgacttgaacacgcgaccctctgattacaaatcagatgctctaccaactgagctaagccggcaatctactaatgcgggtgaagggacttgaacccccacgccgttaagcgccagatcctaaatctggtgcgtctgccaattccgccacacccgcatttctaaatgacccgtactgggctcgaaccagtgacccattgattaaaagtcaattgctctaccaactgagctaacgagtctacggtcccgacgggaatcgaacccgcgatcttcgccgtgacagggcgacgtgataaccgctacactacgggacctatgggagttaacgggatcgaaccgctgaccctctgcttgtaaggcagatgctctcccagctgagctaaactccctttgctaagcgactaccttatctcacagggggcaacccccaactacttccggcgttctagggcttaacttctgtgttcggcatgagaacaggtgtatctcctaggcaattatcacttaactattgagccttattcactcaaaattgaatatctatagtctaacaagaaaccgtaacgttgtcaatatctctttttggataagtcctcgagctattagtattagtccgctaaatgtgtcaccacaattacactcctaacctatctacctgatcatctctcagggctcttactgatataaaatcatgggaaatctcatcttgaggtgggcttcgcacttagatgctttcagcgcttatcccttccctacatagctacccagcgatgcctttggcaagacaactggtacaccagcggtaagtccactctggtcctctcgtactaggagcagatcctctcaaatttcctacgcccgcgacggatagggaccgaactgtctcacgacgttctgaacccagctcgcgtgccgctttaatgggcgaacagcccaacccttgggaccgactacagccccaggatgcgacgagccgacatcgaggtgccaaacctccccgtcgatgtgaactcttgggggagataagcctgttatccccagggtagcttttatccgttgagcgatggcccttccatacggaaccaccggatcactaagcccgactttcgtccctgctcgagttgtagctctcgcagtcaagctcccttatacctttacactctacgactgatttccaaccagtctgagggaacctttgggcgcctccgttaccttttaggaggcgaccgccccagtcaaactgcccgtcagacactgtctccgatagggattgcctatctgggttagagtagccataacacaagggtagtatcccaacaacgcctcaaacgaaactggcgtcccgttatcataggctcctacctatcctgtacatgtggtacagatactcaatatcaaactgcagtaaagctccatggggtctttccgtcctgtcgcgggtaacctgcatcttcacaggtactaaaatttcaccgagtctctcgttgagacagtgcccaaatcattacgcctttcgtgcgggtcggaacttacccgacaaggaatttcgctaccttaggaccgttatagttacggccgccgtttactggggcttcaattcataccttcgcttacgctaagcactcctcttaaccttccagcaccgggcaggcgtcaccccctatacatcatcttacgatttagcagagagctgtgtttttgataaacagttgcttgggcctattcactgcggctgatctaaaatcagcgccccttctcccgaagttacggggccattttgccgagttccttaacgagagttctctcgctcacctgaggctactcgcctcgactacctgtgtcggtttgcggtacgggtagagtatatgtatcgctagaagcttttcttggcagtgtgacatcactaacttcgctactaaacttcgctcctcgtcacagctcaatgttaaagatataagcatttgactcatatcacacctcactgtttgaccagacacttccaatcgtctggtttagttagcctactgcgtccctccatcactatatactctagtacaggaatatcaacctgttgtccatcggatacacctttcggtctctccttaggtcccgactaacccagggcggacgagccttcccctggaaaccttagtcttacggtggacaggattctcacctgtcttgcgctactcataccggcattctcacttctatgcgttccagcgctcctcacggtacaccttcttcacacatagaacgctctcctaccatgacacttttgtgtcatccacagcttcggtaatatgttttagccccggtacattttcggcgcagggtcactcgactagtgagctattacgcactctttgaatgaatagctgcttctaagctaacatcctagttgtctgtgcaaccccacatccttttccacttaacatatattttgggaccttagctggtggtctgggctgtttccctttcgactacggatcttagcactcgcagtctgactgccgattatatctcgttggcattcggagtttatctgagattggtaatccgggatggacccctcacccaaacagtgctctacctccaagagacttaacatcgacgctagccctaaagctatttcggagagaaccagctatctccaagttcgtttggaatttctccgctacccacaagtcatccaagcacttttcaacgtgccctggttcggtcctccagtgagttttacctcaccttcaacctgctcatgggtaggtcacatggtttcgggtctacaacatgatactatgacgccctattaagactcggtttccctacggctccgtctcttcaacttaacctcgcatcatatcgtaactcgccggttcattctacaaaaggcacgctctcacccattaacgggctcgaacttgttgtaggcacacggtttcaggttctatttcactcccctcccggggtgcttttcacctttccctcacggtactggttcactatcggtcactagagagtatttagggttgggagatggtcctcccagattccgacgagatttcgcgtgtctcgccgtactcaggatactgctaaggttaatctatcattttaaatacgaggctgttactctctttggcttaccttcccaggtaattcttctataatgattaatcctatatcgcagtcctacaaccccgaagtgtaaacacttcggtttgccctcctgccgtttcgctcgccgctactaaggcaatcgcttttgctttctcttcctgcagctacttagatgtttcagttcactgcgtcttccttctcatatccttaacagatatggatactagtcattaactagtgggttcccccattcggacatctctggatcagcgcttacttacagctccccaaagcatttcgtcgttagtcacgtccttcttcggcttctagtgccaaggcatccaccgtgcgcccttattaacttaaccttattaacctagtttctttaaaactagaaaactcattaaatattcacagcgttttcggtttattttcttgttactttctacaatctatttctagatcgtggaatttgatatagatattcaattttcaatgaacaatttgaacctttcgattcaatggagcctagcgggatcgaaccgctgacctcctgcgtgcaaagcaggcgctctcccagctgagctaaggccccacaagacctctcaaaactaaacaagacgcaaatggcaggtttccttatccttagaaaggaggtgatccagccgcaccttccgatacggctaccttgttacgacttcaccccaatcatctatcccaccttaggcggctggctcctaaaaggttacctcaccgacttcgggtgttacaaactctcgtggtgtgacgggcggtgtgtacaaggcccgggaacgtattcaccgcggcgtgctgatccgcgattactagcgattccgacttcatgtaggcgagttgcagcctacaatccgaactgagattggctttaagagattagcttgccgtcaccggcttgcgactcgttgtaccaaccattgtagcacgtgtgtagcccaggtcataaggggcatgatgatttgacgtcatccccaccttcctccggtttattaccggcagtctcgctagagtgcccaacttaatgatggcaactaacaataggggttgcgctcgttgcgggacttaacccaacatctcacgacacgagctgacgacaaccatgcaccacctgtcacttctgctccgaagagaaagcctatctctaggccggtcagaaggatgtcaagacctggtaaggttcttcgcgttgcttcgaattaaaccacatgctccaccgcttgtgcgggcccccgtcaattcctttgagtttcaaccttgcggtcgtactccccaggcggagtgcttaatgcgttagctgcggcactaagccccggaaagggcctaacacctagcactcatcgtttacggcgtggactaccagggtatctaatcctgtttgctccccacgctttcgagcctcagcgtcagttacagaccagagagccgctttcgccaccggtgttcctccatatatctacgcatttcaccgctacacatggaattccactctccccttctgcactcaagtcctccagtttccaaagcgtacaatggttaagccactgcctttaacttcagacttaaagaaccgcctgcgctcgctttacgcccaataaatccggacaacgctcgggacctacgtattaccgcggctgctggcacgtagttagccgtccctttctggttagttaccgtcacttggtagattttccactcctaccaacgttcttctctaacaacagagctttacgatccgaaaaccttcttcactcacgcggcgttgctcggtcagacttccgtccattgccgaagattccctactgctgcctcccgtaggagtctgggccgtgtctcagtcccagtgtggccgatcaccctctcaggtcggctatgtatcgtcgccttggtgagcctttacctcaccaactagctaatacaacgcaggtccatctcacagtgaagcaattgctccttttaaataactaacatgtgttaattactcttatgcggtattagctatcgtttccaatagttatcccccgctatgaggcaggttacctacgcgttactcacccgttcgcaactcatcagtctagtgtaaacaccaaacctcagcgttctacttgcatgtattaggcacgccgccagcgttcgtcctgagccaggatcaaactctcattaaaagtttgagctttgctcttttctgtctcgctgacagatttattgtttttttgtcattgacggatttacaatgtaaatccaccctgcacattcgttcgtcttgttcagttttcaaaggtctttgcctctcttgagacaacttctatattctagcaaacttattctgctttgtcaactacttttttttaagttgttaactacgcgttactagaagctgctctctcgagacaacttattcattatactaaatatttctacttcctgtcaatactatttttgcattttttcttttatttttaaaaagttaatattatttatagtaactaaccttctatacttgttgaatggatagcatttttaccgttgtcatgttcatatttcatcttcttaattcacaaatttaaacttcatcttcataaaaaatacccttcaaattttatctaaatttgaagggtatttgaaatttataaagttctttaaaaatatatgatgacttattttttatcttcttcttgcattttttctttgatttcatcgtatgataacgctcttgctttatcttcatcattttctgtctcaggcattttacctgtctcaaaaatcgatttaatctgagcagcatcaagagtctcatattttaagagggcttctgcaattaatttatgagtatcacggttttcgttgataatatcagctgccttattacgtgcttcattaagaaggtgacgaacttcatcatcaataagttgtgcagtttgagcagaatatgatttttcaggtgacatttgaccagccatcattgcgtggttgccttcgtattgaactggtccaagtttctcgctcataccatattcagttaccatagcgcgggccatagcagtggcttgttcgaagtcatttgaggcacctgttgtctgagcgttgaaaataatttcttccgctacacgtcctcccataagacctgctaattgctctttcatatcatcttttgaaagaagcatttgatcttctttaggtaaagcaatcatatatccacctgcacgaccacgtggtacgatagtaactttatgaacaactcgcgcatttgaaagaatcaaaccgacaattgtgtgcccagcttcatggtaagcaaccatagctctttctctttcagaaatagtacgatcttttttagaaggaccagcaattacacggtcttctgcttcatcaatatctgaagcatcaataacttttttatttcgtcgcgcagcaactaaagcagcttcattgagaacattctccaaatcagcaccaacaaatcctggggtttgttgagctactacttttaagtcaacattatctgctaatggtttatttttagcatgtactctcagaattgcttcacgaccttttacatcaggttgtccaactagaacttttctatcaaaacgtcctggacgcagtaatgcgggatctaacacatcactacggttggtagcagcgataacgataatactttcgtttccttcaaaaccatccatttcaattaaaagttggttgagcgtttgttcacgttcatcgtttccgccacccataccagctccacgtcgacgtccaacagcatcaatttcatcaatgaaaataatagcacgttcagcttttttagcatcttcaaacaaagagcgtactcgactagctccaacaccgacaaacatttcaacaaaatctgaaccggaaatactaaagaatggaacccctgcttcaccggcaacagcttttgctaatagggttttacctgtccctggaggtccttctaatagaacccctgctggaattcgggcacctagagatttatatcgtttaggatctttaaggaagtcaacgacttctattaattcttgcttttcttcctctgctccagcaacatccgaaaatcgaactttaacctcatctttactagatgatcttgctttatttttaccaaagctcatggcaccacgagcgccaccgccaccgccttggttcatcatcatcatgaagaaaccaatcatgataactaaaggtaaaaaactggcaatataagaaatccatgtcccacttgaactttcatgtttgacctgaatattagtgttattttcttcagcagcgctaacaagagattttattgaagagtcatttggtagtataacagaattaaatcctgtaactttagtagcaacactaccacctaaaaaagtaaaactattagctgatttaattgttttggctttcttatatgtcccactaacttcaacaacaccaccacttggctggtatgagatagacttaatttctccagcttttaattgtttaacaagttttgtataagaaatttgctggttttgagagctagttccttttaaatagtattgaaaggttgtaataaccgcaataatcaataatatgtaaataaaggaatttttcagaaaaccattatttttattatttttcatagtttaagagagtaccttttttctattttgagtaaatttcttcttttaacacaccaacataaggtaagttacgatagttttcagcatagtctaaaccgaatcccacaataaattcatttgggatatcgtaacaaacgtaatcagcatcaatatctaccaatcgcccttctggcttatcaaaaagggttgcaactttgacagagttagcttggcgatacttaaacatatctcgaaggtattttaatgtacgtccagtatcaatgatgtcttcaataaagattacatctcttccttcaatgttagtatcaacatcttttaaaattttaacttctccactactagttgtaccaccatgatagcttgaaacaaccataaaatcaatttcaacatgtgtatcaatatgctttaatagctcagccataaaaggcactgacccctttaatacacctactaataatggattcttacctgcataatctgcagttaatttagctcctaattctttcgttttcagaataatatcttcttctgaatataaaactttttttatatcattttcaagcatgatgtcaccttttttctaaattttcaatataaagtttgcccttcattatatcatgttcagaaggttttctcaaatatgttctacctgcaacaatcacaaatatcaactctttattttgctccccaataacagcttcttctctctcttttagagttattttctcatcaataaatagacggcgaatttttttagtgtgatttcctaaaaatatcctatccccttcttttcttcttcttaaaataatcggagaagtatcataaataggaatagtaatgtctgcttgagaaatgaattttccataggaaaataaatattgtgagaatatttgtatattatgcaattctaatcttttttcaaccttaaaactatccgtcttaggatggatttttgtaatatgaaaactctcgtaatccttatgaagaaaatagcccgatttaatagtatagtcaatattggctttagttctaatcaattttaatattactctgaactgttctttactcacttgtaaatctggaaatttgctaatgtaatcttgcaataaaaattcttggacagaatgagtttgccttaaaaaatcatagcagtttgttacttcgatgctccttgttaggtctgttaaagccgtgaataaacactctgtttcctcagagagagttatgagaga
